United States Patent Application Publication US 2008/0229439 A1 - sequence listing, part 14

SEQ ID NO: 29744 - DNA, 1572 bp, Glycine max
  Clone ID: TF_GmC1165_1
tgaaaacactgatgaggtgttactactgaatacttcttgaatatgattctattcttatttcagttcaagtttatgtaaatatatgctttgtcttattttgtttgcagattcgtgtatgttgaacttctggaaattcgtaaagatgtccaatgcccaatttgccttggcattattaagaagacaagaactgttatggaatgcttgcaccgtttttgcagggaatgcattgataaatcaatgcgactagggaacaatgaatgccctgcttgtcgcacacattgtgccagtcgtcgttccttgagagacgatccaaattatgatgccctcattgccgctttatatccagatattgagaagtactcacaagaggagcttgaatttcgtgaagaggagaagaaccgcaataagcagattcaagcttcaatagcaaaagtagttcaacggcaatctgaagcattggttaagagacgtaaagacacaccaggtgaatttgtaactagaccgcagcgtaatcagcgaaacattcattctaggagacaaactcaagcaattgaaggatctgaagataatgaggaggaaaatgacaataatgaaaaggactcatcttcagctgatgaacgaagtacagaacaccggcagagaaggagaaagagatgggctagagttcgcccctctcaaccctcatcatccatgacaagtcctgatggtggatgcaatgatagtgatatggatataagtaaagaaaatcgtggaatttcaaggcaggtgtcgaaacatggaaagcttacttggggaaggggtggttttagaagtaacactcggcatggtagtggtggtggtagcaatagcaaaagttctcgcagtagtcgattgtctaagtttgttgaccatctccgcaacttggatgaaaacactgatgagtttgatgtccatctcatgcttgtttctcttgaccaactaagtacaccaagtttgcagcaaccttacctttgctgtcgaccaactttgtctgtcaagcacctttatgaacacgttgctcgtcagacacctttgccggttgaaggaattgagatagtggcagtcaaaggatgctgcagtacgaactgtgacaagtcagctgatgagaattcggcccttgcatatgatgagctatcaaagctggttatagatccacacaaagatgaactggaaattttgcaaggacatgagactctggcagggcttagatccaaatgcatatccaagatggggcatttgattattgcatacaagcagaaggaggtatcatagtcttggtttcattggcgatcttgacattggctatgccataaatttctttgttatgtacataaaaagaacaattgccttttgcatcctcaaccccaaaaaaagaaaaaataaaaacctatggtatactagtgttatgcaagcattgtaatatctttatttttagatttaccttctaaaaatactagttaggtttcagttttacttaaaaaaaaaaaaaaaaaaaaaaaaaaaaaaaaaaaaaaaaaaaaaaaaaaaaaaaaaaaaaaaaaaaaaaaaaaaaag

SEQ ID NO: 29745 - DNA, 1301 bp, Glycine max
  Clone ID: TF_GmC1801_1
cgcccaggtagagtgagagagacagatctctctcaaggcagagatcttgtgcgtgtctgagagagagagagagagacagatctctctcaaggggtttaattgcagagatcttttgcgtttctcaatataagtgaaagagtagacagagagaaagagaagatcaaaagagctaaccctggctccctgaatatcttctcgttttttatctgaatcacgctttagtttgtctcttagctttgttttcgtttgatcccatgcccctctagctaaactcgtttgtcttctatgccaccttcagactgatcaaaacaaaacaaaacttgtttttttcgctatcttcttctccctttgaggaaagcataaataaaaagcgatagaaagggatcgatagaaagagtcttgtggagtagctctcactgtaaagatgggtactggttggagaagagccttctgcacccgcgaccctgcatctaccatatcggataaacatcccggaagcccaagcccgagcccaagaacctgcactcgattgggttttctctctggtggtagcaacccttccaccccacgcttgcgttgcacaacaaaagcggaaactgcttctcaaacagttacattaagtgatagtcccagagttcaaagcaagaacacccccagagcaacgaaatcaccatcagtctcaaatccaacttctccacgctcccctctcaagctctccctcttcaagaacagcttcaaattcagggtatgtcatgcttctttcatctttttaagattcccatgtatggagtattcaatgattgtgatttgttatggttgagcagagtagctgtggaatttgcttgaacagcgtgaagacaggacagggtacggcgatatacacagcggaatgcggtcacgcgtttcatttcccgtgcatcgcagcgcatgtacgcaagcatggaagcttggtgtgccctgtttgcaaggccacgtggaaagacgcggacgcgtgggcggacgcgtgggtcgcgccagaatccgccgaaaaagacaacgtcgtcgccgtccagagggtcacagaaagtccttaccccaatggccaacgacaaaaagccaacagagaataataatgcctcccccgttttcaaaacctacaacaaccacgtggagcaaccatcgaagcattccgattcaaccaggtcctacaacgatgacgagccactcctctctccacctccggcggccggattattccaattcccgaagccgacgagaatgccgaagacgacgaggatgaagaccccggcgagttccagggc

SEQ ID NO: 29746 - DNA, 664 bp, Glycine max
  Clone ID: TF_GmC1801_2
gagtagctgtggaatttgcttgaacagcgtgaagacaggacagggtacggcgatatacacagcggaatgcggtcacgcgtttcatttcccgtgcatcgcagcgcatgtacgcaagcatggaagcttggtgtgccctgtttgcaaggccacgtggaaagacgtgcctctactcgcggcgcacaagaacctcgcgccagaatccgccgcaaaagacgacgtcgtcgccgtccagagggtcacagaaagtccttaccccaatgccaacgacaaaaagccaacagagaataataatgcctcccccgttttcaaaacctacaacaaccacgtggagcaaccatcgaagcattccgattcaaccaggtcctacgacgatgacgagccactcctctctcccacctccggcggccggattattccaattcccgaagccgacgagaatgccgaagacgacgaggatgaagaccccggcgagttccagggcttcttcgtcaatcccaaaaactcatcctcgtccaaatcctactccgattcgttgcaaaccagtgacggtgattccagaaccgttcaggtgaaactgatgccggagtgcgctgtcatctcagcttcccgaacacacgagacctacgcgttggtcttaaaagtgaaggctccaccgccgccacct

SEQ ID NO: 29747 - DNA, 764 bp, Glycine max
  Clone ID: TF_GmC12487_1
aatttctagctagttgtctacaaaagactttcttcgaaacttgtgttctctcttcgaatttcaccaaaacactaaattataaccatcatgggtgatgttctaagccccttcaccatctcatcccctcctccaccctcctctccatcaaccaagagcaacagcatgcccatgttgtactacggtctcgtggtggtcggaaccgccgccatagtactagccatatacaacctcgtcctcctaagacggagccacacgcgccatgcgctgccgtcgcaaagtactgggcaaaatagagatattgtacgagtgcccgagatgagaacgaggagcttcgaggacagccaacaaaggaacttgttgtcgagcttcaagtacaagaaagaagttgtggccaaagaagaagaacaagaagaagaagagcaagatgatgatgaatttgagtgctccgtttgcttatcggtttatgaagaaggtgaagaggtgaggaagcttccacagtgcaagcactatttccacgttctttgcatagacatgtggctttactcccacttggattgcccgatttgtagaacgcccgttgatgttgttggccctttgtgtccgctggagaattcacctgatgggatgatggaatccggtggtggcataccatcatctctctagattatgtggttggggagaaattattagataattatctcacattaatcatatattcttcttcgattttcatatcacacctaattaaattgagcttaacgagg

SEQ ID NO: 29748 - DNA, 2106 bp, Glycine max
  Clone ID: TF_GmC1017_1
aaagacttgagatctcagattacaccctttctcggctcgtcttcggaaataaaaaaatcccaaagaaattcaatcttcttcatccccaaaccaaagacttgagatctcagattacaccctttcttcctttgttttctcattcctgtcctttctcagacaacaccatctctctctctcttgttccctttttagggtttttgtaatgggtctcggtaacgacgaagaagaggataacaataacaatgataaggttgtggatgacggagatgttggaggaggaaagtctttcggttcagtgtcgtgttccatttgcctcgaggttgttgccgataatggggatagatcctggtctaagcttcaatgcggtcatcaatttcacctcgattgcattggttcagcattcaacataaaaggagcaatgcagtgccctaattgtcggaagattgagaaaggtcaatggctatatgctaatggttgtcgctcatatcctgaatttagcatggatgagtggactcacgatgaggatctttatgatcttagctactctgagatgtcctttggagttcattggtgcccttttggcaacctggcacgacttccatcatccttcgaggaaggggaattttcatcatctgcgtatcatgatgtattgggacaacatgccatatttgctgaacatacagctgtgtcatctgccagccatccttgcccgtatattgcttactttggaccaatacatccatcctcctccaattctggtggaactgtatcagaagcttcaaacttcaaccattggaatggctcgtctgtgcccagtgacatgccaacttcctacacatttcctgctgttgatcttcattatcgcagttgggaacaccactcccctcctttctctacagcaagtagtcgtctagttgctgcagatcagccatcagtatcccctggtagtcaaaggccagccaggggtggttcggatgtaccaagatcaggatcttttatgcatcccttccttgttggtcacagttctgctgccagagcggggagctcggttgcttcctcaatgatccctccttatcctggtagcaatgctcgtgcccgtgatagagtccaggctcttcaggcatactatcaaccacagcaacctcctaattcaaccacaatgcggacacctatcgcttctggcacccgaagatccagtagtcataatggaccagctcaattagctccaatggccacatcgccagaccaaggtggtggcttctttcttatcccatcaagttcatcaggacgcaattttcaagaagaaaatcatcatctaccaaatcacttccatgcttgggaaagagaccacttgccttcattatcattgaaccatgttgatagagattcaggttggagagcataccaccaggctaccagccggtcagacccagctaccaggtccagcagctttcgtttaaggcacggatcagatagaatgccttcacaaaatcggtaatacacttgtatcctgttcactgtgaagcaaactaccattactatggaaagttatgtatgctttgaaaaatgttacatattgctttggcacttcggcctttgggtctgtcctgttatgacagactatatactctggctggccttggaattgatttttccatagccaccggtgtgatggacatttgcttcctctagtttatttgccccggtgggcataaaataagatggtatatctagttggggaaatcaggttttggaagaaatactgggacgttgtgatttcaagtggtgaatcaagtggacgaaagcagctgtggctggatttgtagtgggtcaactatttatgtttgataacaacgctcatgcaaatgctgtgtattgagaatacaattttacttctactccatggcaagagtgatttgtaaactgttgtgcaagaattgagccaaggtatatggtaatggaactcgcatgagaactaccatacctcggaataataggagttcaaaggctggttttaaaacaatcgtataactggtttttttataaaatattatttcaaaaccaaaaaaaaaaaaaaaaaaaaaaaaaaaaaaaaaaaaacacgcc

SEQ ID NO: 29749 - DNA, 1857 bp, Glycine max
  Clone ID: TF_GmC1017_2
ttcatttgtacgcccacgcgtccgctttttcgtttgttttctcatccctgtcctaactccatttcatttaaacgccgtcgttccctctctcgctcttgttccgattttagggtttttctaatgggtctcggtaacgatgaagaagaggacaataacaacaacaataataataataagaataacaatgataaggttgtggatgacggagatgctggaggaggaaagtctttcggttcagtgtcgtgttccatttgcctcgaggttgttgccgataatggggatagatcctggtctaagcttcaatgcggtcatcaatttcatctcgattgcattggttcggcattcaacataaaaggagcaatgcagtgccctaattgtcggaagattgagaaaggtcaatggctatatgctaatggttgtcggtcatatcctgaatttagcatggatgagtggactcacgatgaggacctttatgatcttagctactctgagatgtcctttggagttcattggtgcccttttggcaacctggcacgacttccatcatcctttgaggaaggggagttttcgtcatctgcatatcatgatgtattgggacaacatgctatatttgctgaacatacagctgtgtcatctgccagtcatccttgcccgtatattgcttactttggaccaatacatccatcctcctcgaattcgggtggaactgtatcagaagcttcaaacttcaaccattggaatggttcatctgtgcccagtgacatgccaacttcctacacatttcctgctgtggatcttcattatcacagttgggaacaccactcccctcctttctctacagcaagtagtcgtctagttgctgctgatcagccatcagtatcccctggtagtcaaaggccagccaggggtggttcggatgtaccaagatcaggatcttttatgcatcccttccttgttggtcacagagtggggagctcggttgcttcctcaatgatccctccttatcctggtagcaatgctcggacccgtgatagagtccaggctcttcaggcgtactatcaaccacagcaacctcctaattcaaccacaatgcggacacctattgcttctggcacccgaagatccagtagtcataatggatctcctcaattagccccaataaccacatcgtcagaccaaagtggtggcttctttcttatcccatcaagttcatcaggacacaattttcaagaagaaaatcatcatctaccaaatcacttccatgcttgggaaagagaccacttgccttcgttgtcattgagccatgtcgatagagattcaggttggagagcgtaccaccaggccaccagccggtcagacccaggtaccaggtccagcagctttcgtttgaggcatggatcggatagaacgccttcacaaaatcggtaatacacttgtatcctgttcactgtgaagcaaactaccattactatggaaaattatgtatgctttgaaaaatgttacatattgctttggcactttggcctttgggtctgtcctgttatgacagtatatactctggctggccttggaattgatttttccatagccaccagtgtgatggacatttgcttcctctagttttatttgccctggtgggcataaaataagatggtgtatctagttggggaaatcaggttttggaagaaatactggggcgttgtgatttcaagtgatgatgaatcaagtggatgaaagcagctgtggttggatttgtagtgggtcaactatttatgtttgataatgacactcatgcaattgctgtgtatttgagaatacaagtacttttacttctaccccatggcaagagtgatttgt

SEQ ID NO: 29750 - DNA, 1490 bp, Glycine max
  Clone ID: TF_GmC480_2
gatcactcaattcaattggatcttttgcattctctctctctggtgtctgatttcagggttgatcttctcttcactgggttcaagaagcttgtgatgatgcttgcagcatatgccttgaggatttttgcaaaagtgatcctgccactgtcactaattgcaagcatgagttccacctgcagtgcattcttgaatggtgtcagagaagctcccaatgtcctatgtgttggcaacctatcagcttgagggatactacaagtcaagaactgcttgaggcagtagagctggaaaggagcttgagggataccccatctagaaatgctgcgatttttcatcatccagcacttggtgattttgaattgcagcatttacccatggctatgaatgaggctgatattgaagagcgaataattcaacatttgactgctgcagcagcaatgaggagatcacaccacctcggccagagggaaggccatcgaactaggtcatctgctcatggccgtccacacttcttagtatactcaactcagccaagtgcaccaccatttgctgcaggaggggaaagtgaaccagctgcaattcctgtaggaattccatctaccccacttacatttgacagaaatgagcaatcatctccacagcagatcccctatttccaaactcggggttcttctttaacttctggctctactgtcgcaacaacaaatcttcaaggagttcactctaatgatagaaggtttgcctctcattcttttcctgcaagccaagacagagcacagccatcagaacaatcgttctctgattctctgcgttccagatttaatgcagtatccacgagatacaaagaatcaatttcgaagggcacaaggggatggaaagagaggctgttctctcccaattcttctatgtcagaacttggttcagaagttaagagagaattgaatgccaaaattgctagcgtgtcccgattgatggagcgccttgaaacaacaagagaaaataatagggctgcaggaacttctttatcaaatccaaatcatttggtgaactgttccattgcagagacaagcaaccaaaacaatgtggaagctcgtggagagaactctttgcgtgacaatagtactccaactacattttctgctagctcagattcaaaatgagttccagtttgcttctgtgaatgcatctttgctcagcatatcatgcttgaaggctaactgtttgctcaggcatgacatgatgaggaatatatgctcgaggcagttgttggattccaataaataaaaaaaagaatctgagacacctgtgtcctagagctaaaaactttttcttttgtgtatatattatataagccgagaaccgtagggagtatttaaggagtaatccaagggagaaagtgttgtgaaattccatcagacttgtgtccataatctgtccctgtgatttactttttggagtcaatggaaatatagatcaaggtggcaactgtaaag

SEQ ID NO: 29751 - DNA, 800 bp, Glycine max
  unsure (1)..(800): unsure at all n locations
  Clone ID: TF_GmC480_3
ggctcgaggatttcagggttgatcttctcttcactgggttccctccgtttcttgagcccccccccccccccccgtttttttcttttctgggccttttccaattctcaatggaggttccagaaatggaaggcaagaccgaaagtcatgtgacatcggcagaagcctttgtggaagggggggttcaagaagcttgtgatgatgcttgcagcatatgccttgaggatttttgcaaaagtgatcctgccactgtcactaattgcaagcatgagttccacctgcagtgcattcttgaatggtgtcagagaagctcccaatgtcctatgtgttggcaacctatcagcttgagggatactacaagtcaagaactgcttgaggcagtagagctggaaaggagcttgagggataccccatctagaaatgctgcgatttttcatcatccagcacttggtgattttgaattgcagcatttacccatggctatgaatgaggctgatattgaagagcgaataattcaacatttgactgctgcagcagcaatgaggagatcacaccacctcggccagagggaaggccatcgaactaggtcatctgctcatggccgtccacacttcttagtatactcaactcagccaagtgcaccaccatttgctgcaggaggggaaagtgaaccagctgcaattcctgtaggaattccatctaccccacttacatttgacggaaatgagcaatcatctccacagcagatccccattccccaaactcgggngtcttctctaacttctggctctactgtcgcacac

SEQ ID NO: 29752 - DNA, 3025 bp, Glycine max
  Clone ID: TF_GmC12020_1
agttattaaagtacatataatccatataacgttaataactctacactgaaggtccgcccgggtcgacccacgcgtccggcgacacagccagcacaataagtacattcgacatagtttggttaataaagtgcatgtagcccgtagaacgtgattaactccatactgaaattaaatagttcatacccttggagctttggccaatcgtccgggaagccgaaccaacgaaccaaccccaaacccctctttttccagaactttcatgtccatcttgccctcacaaacccaagccgcatcttcgtcttcttcctctgcgccatctcctaaccctaattcccaacatggaatcggaatccctattcctcaacccttcccttctctttccccctcaccaatcaacctcactttcggatctctccagatctccgataccccaggttcatcggcttcagctgctcaagattctggtggatcttccgaaaaggtgacagaagtagggtctccaagtggagtaatggtttcacctcagcaaaactctagaacaggttctaggagtcatgggggaagacggactggaatgggaacaggaacagcttcttatcatagaaatcaacaaactcctgggtccgtccattctcacggaagtgccccttcggcggggagaaaagctcagacggtgaacgggaattacttgctgaattttcaatatgacccgatatcccgttctcaaccacggggtcctcctccttcccctaccactacaagaaggcatcggaagaggaagccgtacaacaaagagtttgtttctgcaggcaaattacaagttcatggtgctaggtttgggaaattattcacctgagtcgatggatccagataaaatgttgcagtgggaagatattatatgtgtgacatatttgaccccattttcagttcagtgtccaatttgtttggagtatcccatgtgtccgcagataaccacatgtggacatattttctgtttccgatgtattctacagtacttattgatgggtgaagaggatcacaaaggtgatagctggaaaaggtgtcctttgtgctttgtgatgatatctgccaaggatttatataccttgcacatcacaaatgtaaaacagtatcaagtaggagataatgttgagttcacctttttaacacggaaaaaggattcctttactctgtcacttaaaaataaacgagagacaaataccacatcaggtgtcgatggagatatctgtgatcccttttctaagttcactcttatatcagatgtagatctctcagtgaagcatgcaatatccgatctagatggttggctagccagagctgattcaggtcttgttgatgacctggagaagcttccttatgtttgtgctgcaatgcaacaattagaacagaggaagaggtattggagtgagcacaggtctcatgacagtgaaaaatcttctatgattattgattgtggacaccagataccatcaacagttgcaaattctatggatactgatgatgaaaactgttctaatggatcaataacttcttcttctgatttccttgatcaaaataaggttatgatgttggataagtcaactgctggagcctgttcggatcaaaacttggatgtggagaaagaattaatagagcaggaaatgaatttatcttcttcatatgaggagaaaaatgataatcaaaggcattcagaaggtgttattggagatgtgaaggaaaatagttcatacagtttctaccaggctgctgatggtcagcatctaattcttcatcctctgaacatgaagtgtttgcttcaccattatgggagctatgatatgcttcctcacagaataagtggaaggattctacagttggaaacagttactcagactgaagccatcaggaggcggtatcgatttcttagtcattttccattaaccacaacctttcagctttgtgaagttgatttgagtgagatgttgcctcctgaagcattggccccatttatagatgaaatcaagaagcgtgcaaatcagaggaagcaacttgcaaaaaaggaaaagaaggaaaaaataaaggctgaagctactgctgcttattctcttcccatatcattaagtcatcagtttacttctcgcgatgatcctccaacattctccatggatgactttgaagctctaggaaattcaactatatcatcaagtcctcccctagctggggagagaaaatcattctcaaatgttactaggcttgggtttgctgctgctcatgattctccatccttacaaattcaagaaactagtggtctacataataacaacaggacctctgattcttctgtctcaacaggcttgagaaatggggagacacaatcatactccaatgttatatcaagagcagaatctaatataagctcgaatgcaccaaagacaaatgagttggggaagaagggaaagaaaccaaatcgagttcttctgtcgacagccggtggtaggcgttattgattacttggttgccgacccttacccttaccctagattatgtgggtgtcaaatgatacccaaccttctcccggctagtcccaagccaaactcttttggcagattatttcagtgtagagttattaacgttctatggattatatgtactttatgcgctcttaagtacttatagataagtagatatgtgtggagtgaataaatgtttttagcaataaacaagccaaaacagttagaaggtcagtatattgtttctgtggatctgtagaactgtgctggcgttgggtatgttaattaaatccagactatgagcattgactatacacaagacatttaaatttggaagcgggttttgttaactacagattgattttttaaacaaacaatgtgtgtaattgcttagtcgaggtgatgcgtgagatatcagtatgcccttatgcgtgaatggtggagaacagtgacctgtattcttactaaaaatcttaagaataatcaaaatgaactttaaaaacatactaaaactc

SEQ ID NO: 29753 - DNA, 1673 bp, Glycine max
  Clone ID: TF_GmC5879_1
attatccaaaacgccccagtgccttacgctactgctttttttgtaacagccatatcattaaatattaattaccagagtcaaaagaaaacaatgagtatgcatgtacggtgggtggctattattaattaagaccaaaaccatccaaattctttgcttgtacacctgaaccctaatgaccactttcacacactccattttccaccatgaccttctttttcttttctatttctttctcctcacggaatttccgccgcaggccaccgcgcagcctccgaacacgctgacgccgccgccgcagcaggaccgctttacgaggctgaagttcgacaaatccatggccatcgttctgctgatcctggtggtggtgttcttcatcctagggttcctctccgtgtacacgcgccagtgcgcggagcgcaggatgggagggaggttcgacctctccatcttgatctcgcgccggcaacgcggcctcggccgcgaagtcatcgaaacgttcccaacgttcgtgtactccaccgtaaagagcctcaagttagggcgcgccacgctagaatgcgccgtgtgcctcaacgagttcgaggaggtcgaaacgctgcgtttcatcccaaattgcagccacgtgttccactccgagtgcatcgacgcgtggctcgccaatcactccacttgtcccgtgtgtcgcgccaatctttttcccaaacctgatgacccgtcttttgatcctatccaaattccggatccggaacaacccgttatatcatcaccgacccgagccgaaactgggggctctaatcctcgttctccgaatttgattgatcagaaccctacgtcgcggtcaaggtcaacgggttttcgtatcgcggggtggtttccgcggtctcactcgacgggtcactcgctggttcaacccggggagaattgtgaacggtttacgctgcatttgcctgaggaagtgcggaaccagcttatgctgagtcgcaccaagagttgcggcgtgggcgtgacgttcacgcgcgagaacagtgaaaggaggggttatagggcgaggagcgttggtagtagcctcagccctcacgtgagggggtggttttctgtgaaggatgatgtcggggaaaggtcttcggatcggttattctccacgtcgacaagggatagtgaggtttagatgcttccttttggtttggtgggtaaaagtcaaatatcattatttcacactttcacaatggcttttgccattttaccaattaaccagcctttctggcctgtgctcctgtatataatatatactctagtaatatttacatgtgtatggttttagagtttggaaattttggagtcttctgttctgtgtggaacaaactacattgatagtaggattttgtaaacgttaataaatttgaaaatctgaaacatttacttattttctagtctacttctttggtactggtcgcaccaggagttgcggcgtgagcgtgacgttcacgcgcgagaatagtggaaggaggggttacagggcaaggagccttggtagcagcctcagccctcacgtgacaagaaacagcaccagtcctcacgtgaggtggtggttttctcggccacgctcgattaaggatgatgtcggggaacggtcttcggatcggttattctccacgacaagggatattagtgag

SEQ ID NO: 29754 - DNA, 414 bp, Glycine max
  Clone ID: TF_9903085
ggttgtgttagcagtcatagtgtgtgccttcctatgcgctcttggtctcaacacaatgctgcaatgtgtgttccaatgtgccaatcgcgttctcacggagccccttcagtggattgcctcaaggaggctcaattctggcctcaagaagagagaaatggtggctttgccaacctcaacttacactcattcttgtgcctctccatcttcgccctccaataatatttgtgccatttgcttaacggaattctctgatggggataggataaggttcctgccaaactgcaatcaccgttttcacgttgattgcattgataagtggctgctttctcactcttcttgcccaacttgtaggaacttgctcaagcccactgattcagtacactccttgcatactgtagtatcatagtttgatta

SEQ ID NO: 29755 - DNA, 621 bp, Glycine max
  Clone ID: TF_GmC3662_37
tcattcagttggcactacacggaactcgatgacagagacctcgagatccgaggtaggactctgttttttgtcatcgtactcttctccattattctcctcgtcactgttctcttcatctacacgcgctgggtttgccgctaccagggacgcctccccaccaccgcgttcaccgccgcagccgcccacgcgccgccgctcgcgcagcctcagggaatggacccagcttccatcaagaaattgcccataatcctccaccacgcgccgtcggaccgcgaggaaagcgcgtgggacgaaacggagtgctgcatctgcctcggcgagttcagagacggcgagaaagtgaaggttttgccggcgtgtgaccactatttccactgtgattgtgttgacaagtggctcactcatcactctagttgccctctttgcagagcttctctcaaggttgaatcttccttccctggggttcggaaaggtcatataattttcctcaacgccacttgttggataaaagtcctcaaagacgttgctcttctgagtcatccctgtgtttggtctactaattggatatgtggtcctgcttcttaggttatgttgttccttggatatacaagcagcattcat

SEQ ID NO: 29756 - DNA, 884 bp, Glycine max
  Clone ID: TF_GmC3662_86
actcctcattttgccagtgcctactaatagcaacagcaaccaaacagtgtctcatgatactgtttttgtttctgatgccccaacgtcgcagccttcctccgccgccacccgccgccgtcttagctctcccttctcataccttggaatcaaatcacgatgtcgaacccagacactcgatcattcaattggcactacacggaactcgatgacagagacctagagatccgaggtaggacactgtttttcgtcatcgtactcttctccattattcttcttgtcaccgttctcttcatctacacgcgctgggtttgccgctaccagggacgactccccaccaccgcgttctccgccgcagccgtccacgcgccgccgctagcgccgcctcagggactggaccccgcctccatcaagaaacttcccataatcctccaccacgcgcctgcggaccgcgacgaaagcgtgtgggacgaaacggagtgctgcatctgtctcggcgagttcagagacggtgagaaagttaaggttttgccggcgtgtgaccattattttcactgtgattgtgttgataagtggctcactcatcactctagttgccctctctgcagagcttctctcaaggttgaatcttccttccctaagattttgattcaggaaccaccccttagaattgacttccagttctagcttcttcttcttcttctttttttttttttacaagagacgatcgtatttatttgagtccattgagattattaagggcagaaaaactcttgtatttaatgcaaatatacatgcagaattggaatttgaaacaaatgattaatctgaaacgaagtttgtttctttttaaaaaaaaaaaaaaaaaaaaaaaaaaaaaaaaaaaa

SEQ ID NO: 29757 - DNA, 1603 bp, Glycine max
  Clone ID: TF_GmC1204_1
ctttttcctcagtggaacaaacctcagaagcagaaaaaggtcttctctctttctctctccttttccctcaagctcagaatctcccgatcgacagtcgacttttggcgcatattttacaaattaagaatcttgttaaaaagaagaaggatgtcaagcggagcaacacactggtgtcatgcatgcagatcgagcagattcggttcgagctttttcctctgtggaacaaacctcagaaaaagattttacaaattaaatattgtttaaaagaaagatgtcaagtggagcaacacactggtgttatgcatgcagacagccaattgtgcttgatgggagagatcctgtttgcccttactgtgatggaggatttgtgcaagaacttgacgagttgcgaggaattgcacccaaccataaccataccttttcgtcacagtcaggagactttcatcaaatgcctgacattttcgatgctatacatgcttttatggggcagagaggttctgaccagagatttgggcttatggacgccgttgataatttcatgaggcatagaatggccggaagaaactcaaactttgatgttagagggaggtctggttctctcccagttcctgaacagagttggggcgtttatagttccggtccttatttaatatttcacggtcaagttcctggattcaccttgtctgctggcagcccaagaggtggtcctaggcgtgttgattttggtgactactttatgggtcctggactggaagaacttattgagcaactcaccatgaatgatcagcgtggtccagccccagctgcacgatcttcaattgatgcaatgcctactattaagataacacaggcgcatcttcgctcggattcacactgtccagtttgtaaggaaaaatttgaattgggcactgaagccagagagatgccatgcaaccatatttaccattctgactgtattgttccttggttggttcagcataactcatgtcctgtttgccgtgttgagctgccacctcaaggacaggctagttcccgtggtactcgaagttggggaggaaggaatgccagcaacagcagcagcagtggcagcaatgatagctccaggggcagagagaacagccatcagaaccatggaaggagaaatccattttcatttttgtggccattccgctcgtctaactcgaacaataatcattattctgagactgggggaagcagctcttcaaccactcctgaccagaataatggaacaagttatagcggttggccctttgatcgctaaaagtatcctttcttctcctggataagtacaatttgctgtctaataatgcttgtaatttaaaatgccaaggaaagagtttattagtattgtattttaaacttaagctcatgtaaggaagatagaagtttcttaaaatctttgtacatgaaattgcctggtttgttgaatctctttgaaactttaatgccgcacctgtcattattcaatttgattgtatcttgctgcttagttggtttgtttggttcctttggggtcttggcagcaagcccaatatgctaaagactaaagagagtgaatttggtttgttaaatgaatctttta

SEQ ID NO: 29758 - DNA, 1326 bp, Glycine max
  Clone ID: TF_GmC4746_1
cggaggctcgccggcgaatggcggaggaaagggtgcctttggtgtctttggagagggtgccgttggtgtctttggatgatgggattgttggcgctagggattcttcttcttcatcatcgtcctctacttaccagaggtatgatattcagcaggttgcgaagtggattgagcagattctaccgttttctctcttgttgctgattgttttcatccgccagcatttgcaaggtttctttgtcacaatttgtatatcagctgtgatgttcaagtcaaatgaaattgttaagaagcagactgccctgaagggagatcggaaagtctctgttcttctcggtatctcttttgcctttatgctgcatgtgataagcatttactggtggtatcgaaatgatgatcttttatacccactggccatgcttccaccaaaaacaccgccacctttctggcatacaatattcatcattttggtgaatgatacattggtgcggcaagcagcaatggctttcaaatgtttgttgcttatttactacaaaaatggaagaggccataacttccgtcggcagggtcaaatgttaactctggtcgagtatactctgctgctgtatcgtgccttgttgccaacaccagtttggtaccgatttttcttgaacaaggattatggaagtctcttttcctcactgaccacaggattgtatctaactttcaagctaacatcagtagttgagaaggtccagtgcttcgtttctgccttaaaagcattatcaaaaaaggaagttcattatggggttcatgccacaacggaacaggtgaatgctgctggtgacatgtgtgctatatgccaggagaagatgcaggctcccatattgttgagctgtaaacacatgttctgtgaggagtgtgtatctgaatggtttgagagagaacgaacttgtccattatgcagggcattggtaaaaccagctgatctgcggaccttcggagatggatcaacaagtctattttttcagttgttttaagttcattttctttgacttgttgggtcatgtttttgagccaaaatcttcctggaaaatgtcaccatctatggtttggtaaaattttccattaatgaaattgagattgaaaaaagaataaagagatatttatatgtatggttaaagtatataagttcattctagagtaatgaggtcagatgtacaaagggatatagatagctggcattatactgaaatccgcgtggatctcttaacctgatattcgtcacgtcacacaatggaaacttttgtttataatgttacatttcaaattaaaaaccctcttcctcca

SEQ ID NO: 29759 - DNA, 959 bp, Glycine max
  unsure (1)..(959): unsure at all n locations
  Clone ID: TF_GmC1492_1
tttataacagcgctcgaacttcccctcctctctccctgcatcgccggacttaacagcgcctgctcttgttaaattcttctctaccttactactccctcactttgtgttagaatcatcatgggtttgcaaaaccaattaaacgacgtgtcgtcgggttcgattccgcttctggtgttggcgcagatagccacctgcgtcaactacctccgctccatgcttttcgcgcttttgcaaaccctaggtctcagccgattccactccgaccagatcgtcgacgagcgcttcctcgccgccgtcggatccggcctcgccggacttatcatgctctccgatcagctcaccctcagcagccaattcttccaccatcaccacggcaccgccgccggccacgaccacgaccacgaccaccacccctgcgtcgtgtgccaggccaccttcgaggacggcgaccaggtccgcatgctcccctgccgccacgtcttccaccgccgatgcttcgacggctggctccaccactacaagttcaactgcccactctgccgctctccgctcttctccgacgagcgcgtggcactcacggagcgccgcctcggccagcaactcatctcttggttctccctacactgatgcggccacgtttcgttttctgaacctccacttttacggttttacccctctcacgcgatcactttttacagagctgtacgcgggtttctttttctgtttttcttttccttgtttttaatattagttttttttttcccatagggtattaggctagatttatttatttttctctttttaacagtaatttttctgaaggtattttttgaagggttttcttccgtctgaaaatcctttttgagatgctgtaaattttggactctgtgtttatggtaataatcggagatagtagatgtaaagttttcatgaanacaaaaaaaaaacaccacnnnaag

SEQ ID NO: 29760 - DNA, 962 bp, Glycine max
  Clone ID: TF_GmC1492_2
cgacacgatacataacaccgctagctcttcaattcttctctccctcactactctctattcgttagtgttcttcaattcttcatcgcagacttagaatcatgggtttgcaaaaccaattaaacgacgtgtcgtcgggttcgattccgctgctggtcttggcgcagatagcgacctgcgtcaactacctccgctccatgcttttcgcgcttttgcaaacccttggtctgtgccgatttcactccgaccagatcgttgacgagcgcttcctcgccgccgtcggatccggcctcgccggactcatcatgctctccgatcagctaaccctcagcagccaattcttccaccaccaccacgccggcgccggcggccacgaccatcacccctgcgtcgtgtgccaggccaccttcgaggacggcgaccaggtccgcatgctcccctgccgccacgtcttccaccgccgctgcttcgacggctggctccaccactacaagtttaactgcccactctgccgctcaccgctcttctccgacgagcgcgtggccgtcacagagcgccgcctcggccagcaactcatctcttggttctctcttcactgatgcgaagccgtttcgttttctgaactcccacttttacggttttacccctttctcgcgaccactttttacagagctggacgtgggtttctttttctgttttttcttttcctttttactttccctcctttttttaatactaggggttttttttttaattttttcctccccgtgtagggtattaggctagatttcttttcttttttttaacagtaattttgctgaaggtattttttgaagggttttctaccgtctgaaaatcctttttgagatgctgtaaattttggactctatgtgttcatggcaataatcggagatagtagatgtaaagttttcataaaagaatattcggtttaactttttcctttt

SEQ ID NO: 29761 - DNA, 2444 bp, Glycine max
  Clone ID: TF_GmC1055_1
gtcttataagattaggttagaaattttatttgaaaatgaactccgataatcaacaacaatcggaggaaccaggaaatgcacaaaaatcactggagcattcggcagatattgctcaaccacaatccccaaatcaaacaactgctggaacatccactttgacggcagaggacacagaaaagccaaaatgtgcggtttgcggtgaggaaaatgccaaaatgcattacggtgttttggcatgcttgggttgcaagggcttcttccgtcgtgcactgaaaaagctgaatgaatatgaatgtttgcgcaacaacaattgcatcattgataaacaggaacgaaattcctgccgatcttgccgccttcaaaaatgtctcgatgttggaatggatccagcagccgtccgtcctgaccgtgatttcactggcaaacaacaattggcccgtcgattttcccattcaaaaggaagcagcaaccataaatcctctcagccaatgggaaaatgcagtggagagcgaaaaggaggaggaagggatgaggagaccgccggcaattgggcacatcgtcttccggtggaaatgcgcacaatggtgatgactttgcagaatattgaggcaaaggttgttcacggcgatacggcaaaagatgcagcagaaatttatccattgagggtcaacacaatccgcgagatcatcgaagagccaaccaaattgaggggaagacgcaccgaaatgcgctatgagccatacagaatggcaaaaaatgaggaattttcggtgattgtttatcgtcgactgattgccgccattgattgggtcgaattgttggccgaacgaatgggtgggctttcaattgaggatcgtattgcactggtcaaatcctgttttgggcccttgacgttgttcaaatgttcggcgaggacggcggttgtgaccagcaatgagaatttgctttgcctttgcaattttgcctatgttccacgcgaaatcaacaaagcatacaatgatgcatatcacctggaaaatggcctcgtggatcggctactcaatgaattggttgctccatttcggaaaattcatttagccgaggaggaaatagtttgtgtgtcggccataattgtgctgaatccaatggcaagggatttgtcagaaaatgcagccgaaaaagtttttcagcttcggaatcgagtctacacaacactttatcaaattatcaaagaatgtcgtccaaattgtaacacaaatgccacatttggaaatttgcttctctatttgccaattattacgtctctggccaatgcaatgagcgataatttgcgttttgcacaaacattttccgcacacggaggaagtcctttgctgaccagtctattcggctgttttcccgttgaaccatttgtggattcagaaatggcattggtcaaggcggttgaggggaaatgcattgctgaaaaacgagtgcaaacagaagaagagaagaaaatcaaagcgaaggagaagaaagaaacagtgttgcagaaacaaaaacggcgcaaatccgatgcaggcacccaaactgaatggaaatcacaattgaatcaaattacacgaaaacgtcgtctctgtccattggcctctgtggaagaaagcaatgaatttcacctgctgaaggccccatgctcttataccctcacggaaatgttcgacgatcgaatcaacaattgtggtgttgacgaaattgaggaggaggaagaagacaatatggaaaagaattatggaaacaatgcaacattgccatttgggacggaaaatcggcgattgattcggacaacaagctatcaacaaatgcacctccaacaaggaattgatgagcaacaagagttccggagaccgtcagccacttggacaaatgcaccttcacaaaaccaatcacaatcgcatggtcagcaacaaacacaaaattggccacagccacaacaacagcaatgttggccaaccaattcagcttcaacttcaaagggaattcccgcgatacttcctcctaccacccaaattcaaggcctttttctcaatgagccatcatcctcttcgcaacaacaatattttcaaggagcacgacaatatggcgatagccaatggactgtgccaccctcatcatccatgcaaatgcaatcaaattttacgccaatttatttgccctattcatcttcaatttcgccacattttgcctcaaatattcccacacaaattcattattctcaatcagcagcacaatatttccctcaacaatttgccccatctttttatccacctgaaccacaaagtcaacaacaattcacatatctcacggttaatcctcaacaacaatttttcaatgataataatactaataataattaacatttattccatttcaatatgattttgtgatattaaaatgtgatttaataaatgaataaatatttgaatttt

SEQ ID NO: 29762 - DNA, 3035 bp, Glycine max
  Clone ID: TF_GmC716_1
agcagaaacagacccacgcgtccggtgcattgtgtgtagcgggcaatggcggaacctctctcaaacaccgaactctcttcttccaaaaccctggacccaaccaacggtcacgattccacttcggaaccgcatcaaacggctccggaagacgctcagctcaatcgagaagacgacgttgttccaaccgcgaaacggaagagggacgacgacgtcgaagaccgttcgctgcatccgctgtggaagaccagcctatgctcttacttccggagccacaacggatcgtgcagccacggcggcgcttgccgatacgcgcacggcgaggaggagctccgcccccgccccgacaacacgtgggacccgacctccgagcgcgcgaagaaagcgctgaagaccgagtcggacgaaaagcgcgccgtctcggaggaagtgatgatgacggaggccgtcgtggacgacggtgatgacggttgtggcgcgaatcacgcgcttaacatatgcttggtgcatttgccgcggaaatggagctccgagaatttgaggacttttctctgcgaacagggcataccttttaagcatgctaagaaaaagaaaggcatgatgattggctttgagataccttttgaagatgaggaaacagttgaagagttcaaccatggaattagaaggaaaatcaattggcaacaaaacggtaaaggttgctaatgttcttcctgggtcattcgaaaagaaaagtaatgccattgtaaacatgagcagtgctggtttagcacggcacagggccaaatctatgcccatctcagaggcattccatcctgtaaaggctatggctgttgatctttttccacatactccacactgtgaattggttatgcttcttgagaggtaggtcataggtggaccagacaccaaagtctgggttaggtttcagattctcaaaaaacttactagaaatgctcgtaaagcttgtccaaatggtgtttctcttcctgaatggattctcaagtctagggaaataggtggtcttccgtgcaaactagagggtattattgcatcccctattgtaaatggataccgtaacaagtgtgagttttctgttggatattctctggaaggcaaagtgacagtaggtttcatgcttggaaacttcagggaaggtgtaacagcagttgaggaagcagtggactgcccaaacgtttcaacagttgcttgcaaatatgctacaatctttcaggaatttctacaggacagtgatttaccagtttggaacagatttaaaaatactggtttttggcgtcaattgacggttcgagaagggagaacaaatgggaatgttgttgatgctgaaacgtttagtggtgttgcagaggtcatgcttattgtgcagggagacaagacccctgattacttgaagcttatgatttgtatacctctttttttttaaagcgtcactcagaactctttgcctttggtgttgattataggtttctactgcaagctttgatgatgcaaaagtagctgctgagttcaagaggcttgctcaggcatttgttgccggagctacttcgcattgcccaatattaccccttacagctctggttgttcaggatcaccaaggaatatccaatgtggcaccagctgatgcaccactgcattcacttcccattcctaaagcagctggtgatcctgaggtggatgaaaataataatgccaaggatgtaagaatccatgatcatatcaacaatctccagttttctatatctccaacagcattttttcaggttaacactcttgctgctgagaagttgtactcacttgctggagattggtcatgcttaggtcctgacacactgctatttgatatatgctgtgggacaggaacaattggcctgacattagcacatcgagttggtgattggaattgaaatgaatgcttctgctgtatctgatgcgcataggaatgctgagattaatggcataaaaaacattaaatttatatgttcgaaggcagaggacgtaatgggatctctgttaagggaacacctgaatgtgactaaggaacaagttgatgatcctaatatctctggaaagggcaatgacagtcccgaggatagtgcatgcccagaacctgaaaatggtgaactagcatctcattgtccagaaaataacaatgcagaagttggaagtgaggttcagaagggtagcacttgtgaacaagctgatggtatctctgaacaggcagaggacgtgatgggatctctgttaagggatgatgcaaatatgcccaaggagcaaagtgattatccaaatatctctggaagtgggaatgacattcctgaggatagtaccttcccagtgcctgaaaatggtgaaactacatctcattcagaaagtaacaatgcagaagttggaggtgaggttcagaagggtagcacttctaaaaatgggaagacttcactgcaacagttcaaaaatgttgttgctattgttgatcctccacgtgctggacttcatccaactgtgatcaaagctttgagaactcatccaggcctgcggaggcttgtttacatatcctgtaatcctgaaactttggtggcaaatgctattgagctttgtacgccatcccccgtaaaaattgagaaaggaaataaagacaacagaggatggagaaacatgagcagtgctggtttagcacggcacagggccaagtctatgcccatctcagaggcattccatcccgtaaaggctatggctgttgatctttttccacatactccacactgtgaattggttatgcttcttgagaggtaggtcataggtggaccaaacaccaaagtctgggttaggtttattttatgtgctaggctctcaaatttcatttgtccaacattttttggcggcactgtaagtggtggtggatgttagtgcttattatattctgatcttacgcgcagtgaattatgttcaagcatgaccttcgatattcagttgtagcattattttcctttttgatgcatgtatcatgaagcattatctgc

SEQ ID NO: 29763 - DNA, 697 bp, Glycine max
  Clone ID: TF_GmC706754_1
atggaagggaaatatatttgtacgtattaaaagaaaaaagttcaagcagctaagaaatagactacgctataaacatattacaacttaagggcaatgagaaattgcttcctttgcaaagtatcaaatggtatcattgcaaaagtaccaaaaaaaagtagtatcattacaaagaatactttctctttggttgcttggattgggatcatcagacgtattatgtatgtaatattcaaaaatgaaaatgtcaaacttgacgggaagaaaaaaagaaagacacgacgacgaagacgactactgaccacattctccccaagaatcctgctatacatctcatatattgcggcaagcaagcaagcctcctattttgtattttgtattttttgacccttacttttcatgagaaaagtaattattgtttagctcgtggttgtccatgtttgtaattacacaatgaagaatattatgtaccaattacgtttaatccagcagcagactatggatcttatctttcgagcttcattgatcttggcttaggctgcgatacgacagctttctcttgttcagtaagtgcatggcggaaatggcatctatggccatatgggcacacaaccccagcaaggaccattctgcagacctcagttttgtagcgtgggtggcggatcactgggcgaagcttcccaataccatgagcaaaatg

SEQ ID NO: 29764 - DNA, 1778 bp, Glycine max
  Clone ID: TF_GmC119109_1
ctcgcgtccggtcggaacccctgctgagagaaagaaggcaagtcgctccgacctcgagccacggcaacgttgagcatagagtgacagagtgaagaggttccgtcatggcccccagaatccttctatgcggcgacgttttagggcgcctcaaccagctcttcaagcgcgtctcatcggtgaacaaatctgcaggtccattcgacgcgctcttgtgcgtgggtcagttcttccctgactcaccggagcagctcgaggacttcacgaaatacatcgaaggtggatctcactttcctcttccgacgtacttcatcggcgactacggcgtcgccgcccccaaacttctcttgcaagcttccaaggactccgccaaccaaggcttcaagatggacggcttcaaggtttgccacaacttgtattggctgaaaggcagtggcaaattccctctctttgggttatccgtggcctatttatctggtaggaagtcatccagtggtcagcagtttggaaattacactgaagatgatgttgatgcattacgcgcaattgccgaggaacctggagttgttgatttgttcttgactaacgaatggccgaatggggtcaccaatagagcagctgattcggacattcctgctggactctctgatggcagtgattcaactgtatcggaattagtacaagagatcaaaccacgttatcacattgcaggcaccaaaggcatttactatgcccgcgaaccatattccaatgttgatgctgtgcatgtcactcgtttcatagggcttgcgtctgttggaaatagagataagcagaaatttattcatgcaatctcccccacacccgcatccaccatgtcttcaactgagattgccatgaaaaccacaaataccaccttatcgccatacacattcaaggagaaaagaacttctccaatggattcagcaaagagatccagtgattctatctctgatcctcaatattggagatatgatgttgctcaaaagcgacaaaaacatgaagctggacatggtgataaattgtgtttcaaatttgtttcttctggctcttgtccacgaggagagaagtgcaattttcaacatgatacagatgcaagggagcagtgtatgagaggtgtttgttttgattttttgaataagggaaaatgtgaaaggggtccagattgcaactttaagcacagcttgcaggatgagggcaacaggcttccttctaggaggcctggatctggcaggtcaaaggaatgttggttttgcttgtcaagcccaaatgtggagtcacatttaatcataagcattggggaaaattactacttggcactggctaaaggtccacttgttgaagaccatgtactgattataccagtcgagcatatgcctagtaccttatccatgtcttctgaatctgaaatagagctctctaggtttcagaacagtctcaagagttactgcaagagccaagagaaggaagtcatcttttttgagtgggtctccgtacgtggcactcatgccaatattcaggccattcccattccatcttccaaagcaattatggccgagaaaattttcaatttagctgcacagaagttgggatttgaatttgtgactaagaaatttgatagcatttctgaaggaaggaagtttttgaaggcgcaaattgatggggattcaagcttgttctatgctcaaatccccagaggcacaattctgctgcatcatgttgaagagaaagagaaaattccttgtcaatttggtcgtgaggtc

SEQ ID NO: 29765 - DNA, 600 bp, Glycine max
  Clone ID: TF_GmC69531_1
cgcgtctggtttctctcccaacattctcatctgggtcttcccaatttcttgatttgatctttctccctctcagaaactggcctcagccaagagtttctcctttttccttttcacctgttcagcattgatatttggttatacattgcattaggttgaatatcagtgttttcaatttgataaaagatattgattctgtaagtccatttgctaagaatcaaatcaaaaaagtatcttctaaatttgatagaataggatcaaaatttcgccatgagtttctctgaccatattccatcctttatgatgtcaccgccgtcgttttccacagacacggatgccattgaagtgaggcttcaattcccaacgaacaacgaatcattggagccacattcaccacaggatcaacccccttcgttcaagagggcaaggacctgtgatagcagcctctccaatgcaatggcatgccctccaaggatgattcagcaccctgcacttaacaaaggaacgagccacattttcttcaagacccgtatttgtgcaaagttcagagctggcgcttgtaggaacggcgagaactgcaattttgcacatgggcttgaagac

SEQ ID NO: 29766 - DNA, 560 bp, Glycine max
  Clone ID: TF_uC-gmroLIB3258047g05a1
agtaccaaaagaattagtatcattacaaagaatactttctttttggttgcttggattgggatcatctgacgtattatgtatgtaacattcaaaaatcaaaatgacgggaagaaaaaagaaagacacgacgaggactactgacccaagaatcctgctcgatctacatctaatattgcggcaagcaagcctcctatatttgtattttggattttttgacccatacttttcatgagaaaagtaattattttttggccgggggttgtccatgtttgtaattacacaatgaagaatattatgtaccaattacgtttactcgatccagcagactatatatgggatcttatctttcgagcttaattgatctgggcttaggctgggatacgacagctttctcttgttcagtaagtgcatggcggaaatggcatttatggccatatgggcacacaaccccagcaaggaccattttgcagactttagttttgtagcgggggtggcggatcactgggcgaagctccccaataccatgagcaaattgggagtggtccccatatggacatgtt

SEQ ID NO: 29767 - DNA, 839 bp, Glycine max
  Clone ID: TF_GmC1146_1
tgctaagatatctctgatatatatagtttctgtgtctgatcccgggtttaattcgggttaagattgaaagcgtgagaatgccggtgaagaagtattactgcgattactgcgacaagctattccaagacacaccagcagatcggaaacgacacgttcagggcattcaacaccaccaagccaaagctcgctggtacgattccttcaaacaacaacaaatccctccgattcccaatcgacccctttgctttcacttcgtcaacacgggattttgccgctacggcgactcttgcaaatatctccatcccgttcccaacaacaatgtccagcagccgccaatcgtaaccacaccgtcgccttcaccagggagtgtggtaggagtgtcattcggcaatcttcccccctccctgcagcctccgcctgacggcgtatatctccaccttccctttctcgactggggatagatttgtaattctacccacttctcataactgcatctccgtgtctgtgttctgttcaatcatttcttaatttaaccttttagttcttctaattttcattgtgtggctggattctagtgatttcttatgacctagctccaccgtattatttggagttttcttatatctacccaacgcttaacttatgattaaatccaaaatctatcttattgtaatacatatgataatagactgcttgcttcagcaaggggaggcaaatggagtttatggacctattcatcgaaagcactcttagtttttgacaacatcggatctttttcatctttattgctaaagtgaattttaatatatgttctgaaaaaatatgtttaattaatcatg

SEQ ID NO: 29768 - DNA, 547 bp, Glycine max
  unsure (1)..(547): unsure at all n locations
  Clone ID: TF_GmC1146_2
ctcgagccgttgaaagcgtgagaatgccggtgaagaagtattacctgcgattactgcgacaagctattccaagacacaccagcagatcggaaacgacacgttcagggcattcaacaccaccaagccaaagctcgctggtacgattccttcaaacaacaacaaatccctccgattcccaatcgacccctttgctttcacttcgtcaacacgggattttgccgctacggcgactcttgcaaatatctccatcccgttcccaacaacaatgtccagcagccgccaatcgtaaccacaccgtcgccttcaccagcagcaaggggaggcaaatggagtttatggacctattcatcgaaagcactcttagtttttgtcaacatcttatctttttcatctttatttctaagttgaattttaatatatttttgtagaaaatatgtttaattaatcatgatacccttcgagtgaatgacatcttgtattcaactaagtttatagcacattttcactgtcaggttntacgttagtatctagagaagttatcgaacaa

SEQ ID NO: 29769 - DNA, 510 bp, Glycine max
  Clone ID: TF_GmC31054_2
acgaagctcgaattcggctgacacgtgacgttcattctgtctgttggaactgttggccttttagggttagggtttcggtttgtggatctattgttgcctctgcgatggatcgcaagaggggaaggcctgaagctgccttcaatttcaatggcggcgccaagaaatcgaggcctgcacctccggctgtccatttggtgaaggatgccacttcctgcattatgttcctggtggctttaaagctgtctctcaactgatcaatgttggtagcaatcctgttactcctcaagttgggagaaaccctgttccaccatccttccccgatggatcttctcctccagttgttaaaacccgattgtgcaacaagtttaatacagctgaaggttgcaaatttggtgacaaatgtcactttgcccatggtgagtgggagcttggcaggcctacagccccatcatatgaagatccccgtgttttgggacaaatgccaagcagcagggtaggtgggcgagttga

SEQ ID NO: 29770 - DNA, 304 bp, Glycine max
  unsure (1)..(304): unsure at all n locations
  Clone ID: TF_18691395
tcncgctggtttaggggggttttcgtggccatgtgctgtgttttttggtgcctctggctgtgcctttggtgttggatgtcccttcttgtgttgtgttggaggtggcttctccggtgtctctcagctggtcggtggtggtggggatcctgttattggtcacgttggtgngtgccctgtttttttttctttccggggtgggtcttctgctgctgttgttaagtctcgcttgtgcattgagtttcacgcgggcggaggttgcaaatttggtggctcttgttcctttgcccatggtgagtgggtgctg

SEQ ID NO: 29771 - DNA, 554 bp, Glycine max
  Clone ID: TF_LIB4392-022-R1-K1-A7
gtgttgttcgtgatgatttagttgttgttgatgaggatgatgatgacggtgttgctgttcgtgatgatttagttgttgttgatgaggatgatgatgatgatggtgttgttcgtaatgatgtagtagttgttgttgatgttgatggttggaatggtagtgatgaggggtgtgattggattgagaatgagaatgtgaatgagagtgtttttgataaggtgggagtggaatataaagatgagaggagcagcggtaaagctcaacagtacccgttgaggccagaggctgaagactgtgcattttatctcaaaactgggacttgcaaatttggattcaattgcaagttcaatcacccgcttaggaggaaaaacctggctaaaaacgagaatgcgggagaaagagaagagcaggaagaaagatcaggccagacggaatgcaagtattatttaaggtctggggggtgtaagttcggaaaggcttgcaagtttaatcacacaagaggaaagagttcatcagcatcctctactgcagagcttaacttccttggcctgcctatt

SEQ ID NO: 29772 - DNA, 1298 bp, Glycine max
  Clone ID: TF_GmC1136_3
gagggagttaagggtgagaggagcagtggtagagctcaacaataccctttgaggccagaggctgaagactgtgcattttatctcaaaactgggacttgcaaatttggattcaattgcaaattcaatcatccgcttaggaggaaaaaccaggctaaaaaagagaatgcgggagaaagagaagaacaggcagaaagatcaggccagatggaatgcaagtattatttaaggtctggggggtgtaagttcggaaaggcttgtaagtttaatcacacaagaggaaagagttcatcagcatccgctaccgagcttaacttccttggcctgcctattcgtgtgggagagaaagagtgcctctattacgcgcactggctcttgtaagtttggagcaaactgcaggtttaatcatcccgatcctacaactgttggaggaggtgattctccttctggttatggtaatggaagttctatttcgttacaaggtgtatcacaatcatctatatcctcatggtcttctactagaccattaaatgaatctgctccttttgtgccggtgatactttcacctaatccaggggtttctccccaaagttctgaatggaatggataccaggcacctgtctatctctctgagaggagtctgcatccaccttcaacatatgtcatgaacaacccagctatggaatcaaatgtttatatgcaccatcaaaaacaaatgcaggttgaagagtttccagaaaggcctggtgaacccgaatgcagctatttcttaaaaactggggattgcaagtttaaatctaattgtaaatttcatcatccaaagaatcggattgcaagattacctccatgcaacctcagtgacaagggtctacctttgagaccggagcagactgtttgcacatattaccgccgttatggaatttgcaaatttggaccagcttgtaagttcgatcacccaccaccctcaactatggctggacttgatcaacaatcctcgtatacaaactcagctggtgttgatgtggctgaaaatggagatgccgatgatgggaatcagcagtctgtgtaaaacactgactttgagtatgcacatcacccataatttgtaattttcttatccaaaaacatgataaattatgtaatttcactagttatgcccaatgtggcacaagccttgcagaatagcattatatacctaatagaatttttattactgtaacatgtagattatttttttgcttctggtttgatttctttcacttggatcattattagattatgattttgtgctggtgtaaacc

SEQ ID NO: 29773 - DNA, 444 bp, Glycine max
  unsure (1)..(444): unsure at all n locations
  Clone ID: TF_uC-gmroLIB3259P212a05a1
gcttncntttttttttttttttttctgccttcgcccaaaagaactttggaacattacctaagtactgcataactctaacatccatacttaatctcagggccatatagtagcctcgcacaccttcaacagcgatattgatcataataaccataccctggctaatacaaatggaaaaacaaactcctactcccgacttgcgcttttcaacagctccatgtgcgaagggtcatctctctgcaaaggagcaagatccttgtggaaaattctgacacagctgggtcttgaacttgcttgcagggggggcaggggctccaggaacacctggggtggattttggtggggcaaacatggacacgggctaagagaaatgttttaccatgttgctagctctcttaatgtggacaaaaaaagcctcgagttcaatggttctaatattgggatcgg

SEQ ID NO: 29774 - DNA, 469 bp, Glycine max
  Clone ID: TF_GmC766_3
gtgagtggaatgagaagtgaatggaaaattgaatttccatgatcagtggggtggttagaacttagaagagaagagaactagagaagtgattttttgcaaagacaaagcgagggtttctattgttttgttgagaattcaattcaaagcttttgatttgatgatcataacataacacaatgagagatatttgtaggaacttccagcgaggcagctgtcaatatggagaaaggtgtagatatttacatgttcagcaacagcgaaaacctaatgttaatgggtttggaggtcagagcagttcttatcaacagcaaaatacaaatccctttggatttggctctggctcacaacaacagcagcagcagaagggtaatccttttggttttggcaagcagaacagctcccagttaaatggtgggcctcattctgagcataaacccaaccaatacaagccttttgaaaacaaatggaa

SEQ ID NO: 29775 - DNA, 490 bp, Glycine max
  Clone ID: TF_jC-gmXLIB3563P064bf02d1
ctaaccattccctgtcagaaacagcaccggaatcaggagttctgcctctcgatttccttttaaagctgccattccaatcctcattaggagttctatgctttctttcatctcgctgttttcttctacctgaatgaccgcaatttaactgatccatctccctagatcttgaccttcttctagagtggcacgttctgtcagaatctgtttttgacaaactcatatttccttgctccattgaagtctcataatcatcagaataaccaaataaagcgatcattttttttacccaaaatttcgggggaggtttgtcagaatcggcccattcatagtctccgccgggattacgaaaacagtggataaaattgcatgttgttccatgagaacaagtcttgaaacctgatttcatatactcgccacatatggcaaccttccatcgtgtcaagttaacaaattgacaacttacctgtttcccagcaaagtagcgaccatt

SEQ ID NO: 29776 - DNA, 812 bp, Glycine max
  unsure (1)..(812): unsure at all n locations
  Clone ID: TF_LIB4164-024-Q1-K1-A7
ccacgccgtccggaaaaaaattatagtaaatgcttttgaactacactataaattgttaggttgaaaaattattggacctccaaaacaacttatggggaaagcaagtttgtatgattttttctcttgcccaaaccatgtaatcagcatatgtcactattcataacactttttcctgatgttatggcagtattatcaaaggtctgggggttgtaaatttggtaaatcttgtaaatataaccacacaagaggaaaaatttcaacagcaccagcaccacttttggaacttaactttcttggcctgcctattcgtccgggggaaagagagtgcccctattacatgcgcactggctcttgcaagtttggagcaaactgcaagttcaaccatcctgatcctacagctgttggaggaggaggaggtaatcctccttcagggtatggtaatggagggtctatttcattacaaggtgtatcacaaacatctgtaccctcctggtcttctccaagaacattaaatgaagcatctccttttgtgccaatgatgctttcacctactcaaggagtttctacccaaagttctgattggaatggatatcaggtaaacagagtcaatgccaataaccatatatggcaaggaacaatttattatataattagtacaagataacatttagtcttccagttttctatcatgcaacgttaatgctctcttcacctagtgggataaggctttgttgnntgtgaaatgttaatgctctctgttgctgcacatacattggcaatgccatgtcctcatttttccttttgcaactgca

SEQ ID NO: 29777 - DNA, 1651 bp, Glycine max
  Clone ID: TF_GmC1136_1
gggcgtgggcggtgatggtgatggtgatggtgatggtgatggtgatggtgatgatgatgttgatggtgatgttggtggtgatgatgaagtggagaagaaggaagggagaaacagtggtggtactcaccactaccctttgagatctgaagatgaggagtgtgcattttggatgtgattggggtatggatggtgatgttgatgtgagagggacagtcaccgtgagaagtggagaagagaggctgtaagaagggaggaacagtggtggaactcaacactaccctttgaggcctgaagctgaggattgtgcattttatatgaaaactgggaattgcaagtttgggtttaattgcaagttcaatcaccccattaggaggaaaactcaggctgttaaagagaaggcaggagaaagagaagaaaccacagaaagatcaggcatgacagaatgcaagtattatcaaaggtctgggggttgtaagtttggtaaatcttgtaaatataaccacacaagaggaaaaatttcaacagcaccatgtcagcaccacttttggaacttaactttcttggcctgcctattcgtcgggggaaagagactactacatgagtttttcaatacaaagtgtatcactattgatctgttccctgaactggtctgtctacaagaacattaaatgttcttaaaacctttggatgtgcaattgatgctttcttatctacttcaaggtacgtttatacgggctaaatttctgattggaggataccacagtcaggacatctgtctatttacctgagaggagcattcatcccaccttctacatctgtcatgaacaacccagcaattgatacaaatgtttacatgcaccatcaaaagcagatgcctgttgatgagtttccagaaaggcctggtgaacctgaatgcagctgcttcttaaaaactggggattgcaagttcaaatctaattgtaaatttcaccatcccaagaatcgggttacaagattacctccatgcaacctcagtgacaagggtctacctttgagacctgaccaaagtgtctgctcacattacagtcgctatggaatttgcaaatttggaccagcttgtaagtttgaccacccgataaacttgcagcccgtgatgattcctggacttgagcaacaatcctactcaaactcagctagtgctggggtggctgggataggtggaagtacaggcgtaactgatgcgacaattcagcaatctgtgtaaacatgtttgtctgaggatcttcttgctttgaggatgcatatcaccccaaattgttttcttcttaaacatgataaatttattttacttttcctagccctgtccaatgcagcacaagctttgcaaggaatagctgacatataatatatatcaaacagtttttatgtatttattacaagtaacatctgcatctgtagattatctcttgtttatggtttgttttctgtcagttggatcagtattggataataattagactgttttgtttcactagttatgctaatgtggcacaagccttacagaatagcaatatatacggctaatagaagttttattacagtaacatgtagattatttttttgcttctggtgtgatttctttcacttggatcattattaaaaaaaaaaaaaa

SEQ ID NO: 29778 - DNA, 419 bp, Glycine max
  Clone ID: TF_LIB3242-241-Q1-J1-A6
ctcctggcgggcccggcggctctcactatccaggtccctggtgctgaaccgcctgcgtccagttgccagcgggggtgggaaagcccaaccgggctccccttggtggcggagcaaaggctaccgctgcatcggaggggtcctctacaaagtatctgccaacaagctctccaagaccttcggccatcccagtgatgcgggcagcaggcccctcctgcgcacaggccggctggatcctgcatgcagctgtagccgttccctggccagccgggcagtgcagcgcagcctggccatcatccggcaggcgcggcagcgcacggagaagaggaaggagtactgcatgtactacaaccgcttcggcaggtgcaaccgtggcgagcgctgcccctacatgcacgatcccgagaaggtggccgtgtgca

SEQ ID NO: 29779 - DNA, 474 bp, Glycine max
  Clone ID: TF_GmC74310_4
attaaacctacacactctcttttacagtgaaagtgtgagaaaaacccgtgtctctctctcgggttcgcaacgaggagacaacaccggagctctccgatcttccagaacattctagagtggcaacgggattcattcttcgcttcaaactttaaacacccaaacactaacccatctccatggacttgtacggtcggagccctgccagaaatggacccaacccggtgaaccaacccgaatggagctcaccgggcaccgacactgctctcgaagaatcgatgtggcatttgacgctgggtggtggcgaatcttacccggagcgatccggcgtgccgaattgtgtgtattacatgcgaactggtgtgtgtggatatggtggcaggtgtcgttacaatcaccctcgtgatcgtgctgcggttgctgcagcagtaagagctacaggggactacccagaacgggtgggggaacctccgtgtc

SEQ ID NO: 29780 - DNA, 1013 bp, Glycine max
  Clone ID: TF_GmC568_1
ggtaccctttataaattcctgattggacccacgcgtccggggaaccactaaacgatgatcccaaacgttcaaatccctacctgggacgcggacggaggaggagcactctccccgtcgatctcttccaatgctgacacgtgctcattattctcctccgaccatttccgaatgttccagttcaaggtgcggaactgtccacgtggcaggtcccacgactggaccgagtgtccctacgcccaccccgccgagaaggctcgccgccgtgacccccgcaagtaccactactcaggcacctcctgccccgattaccggaaggggaactgcaagaggggcgacacgtgtcagttcgcgcacggcgtcttcgaatgctggctccacccttctcgctaccggacccagctctgcaaagacggaacaaattgccgccgcagagtgtgcttcttcgcccacaccagcgaccaactccgcgtcgtgacggattcatcgtcgtcgtcgtttgtttcctctcccacttcggtgctcattaactcttcgttctccgattcttcgccgtacagcttcgtccgcggaatagttaaactggatgaggaagggtcgtattcgggtctgacccgttgcgtgttcgggtcgccacgtggcgggtttatgagtgtgaatgggtgcgaggaggagcctgcgatggagagggtggaatcggggagagacattagagcgaggatatatgcgaagcttagtagggagaattccattggatgagtatcggaactcgtgaaatgaatggattccgtggcctttcatttgggtctgtctgtttgtctctgtacaatatataatgcaattcaataaaataaaactatatgtacatagttgagaaggtagagaccgttttgctctctgtgttttgttttttaccttagttcctggctgcccaaaattgggtagcatttgattgtatcaattgttaattttggacttcattcaagaatcatgtttttcttattatttccaaaaaa

SEQ ID NO: 29781 - DNA, 472 bp, Glycine max
  Clone ID: TF_GmC568_3
cccacgcgtccgtacggctgcgagaagacgacagaagggggatgatcccaaacgttcaaatccctacctgggacgcggacggaggaggagcactctccccgtcgatctcttccaatgctgacacgtgctcattattctcctccgaccatttccgaatgttccagttcaaggtgcggaactgtccacgtggcaggtcccacgactggaccgagtgtccctacgcccaccccgccgagaaggctcgccgccgtgacccccgcaagtaccactactcaggcacctcctgccccgattaccggaaggggaactgcaagaggggcgacacgtgtcagttcgcgcacggcgtcttcgaatgctggctccacccttctcgctaccggacccagctctgcaaagacagaacaaattgccgccgcagagtgtgcttcttcgcccacaccagcgaccaactccgcgtcgtgacggattcatc

SEQ ID NO: 29782 - DNA, 662 bp, Glycine max
  Clone ID: TF_GmC1146_3
ctaagatatctctgatatatatagtttctgtgtctgatcccgtttttaattcgggttaagattgaaagcgtgagaatgccggtgaagaagtattactgcgattactgcgacaagctattccaagacacaccagcagatcggaaacgacacgttcagggcattcaacaccaccaagccaaagctcgctgggattttgccgctacggcgactcttgcaaatatctccatcccgttcccaacaacaatgtccagcagccgccaatcgtaaccacaccgtcgccttcaccagggagtgtggtaggagtgtcattcggcaatcttcccccctccctgcagcctccgcctgacggcgtatatctccaccttccctttctcgactggggatagatttgtaattctacccacttctcataactgcatctccgtgtctgtgttctgttcaatcatttcttaatttaaccttttagttcttctaattttcattgtgtggctggattctagtgatttcttatgacctagctccaccgtattatttggagttttcttatatctacccaacgcttaacttatgattaaatccaaaatctatcttattgtaatacagtatgataatagactgctgagtttgctttaacacatacatttataagcatttttcacctg

SEQ ID NO: 29783 - DNA, 2326 bp, Glycine max
  Clone ID: TF_GmC286_1
accgtccggaatcaaatgttccgaagattgcagaaccacagccaggaaactctaagctaatctgacgccaactttcatccaattggaatattattaaatctctttttaagatttcacattttgattcttctcaattttatctgcgattctcgcttggtacctttgttttgtttttaatattttagttttcctggatttttattttttttattttttattgtttttagtctttggtcaattttcactgtctcctgatgatcattttaccatgtggggtgagttaatttgagattgttgtgcgctgatttcttcttaaaggctcaaagggttttctgggtttgatcgaacaagcaaaaaaaaagagtcttctgttatcctttcaacgctaccagatgccggaaaacaggcaggttctgaggaatgctgattctagtgacaacattgaagcaattcggcgtttgaaaatcaatgataattgggatagagatgctgcagctcaatctacccaatatccagatcgacccggtgaacctgagtgcttgtattatttgaggactggagcgtgtggttatgggagtaactgtcgctaccatcaccctgctcatatttcaattggtactcattatggtgaagaactccctcagagggcagggcaacctgattgcgagtattttcttaagactgggatgtgcaagtatggatcaacatgtaaatatcatcatccaaaggacaggcgaggtgctgctcccgtgtcattcaatactttaggccttcccatgcgtcaggaagaaaaatcatgtccctattacatgagaactgggtcttgtaagtttggtgttgcatgcaagtttcatcatccacagcatgcttcccttggagcatacccattggctggatctcctactcctacctcaacaattattcctacatcaggtttaccatatgctggagggtttcctgcatggtcagcagtaccaagaatgtcgtatttatctggacaaggacttcaatcttatgtgcctccttttctgtcttcttcgcaaggtgttatacctgtgcagagctggaacaactacatgggaaatatgaaccctgcaatgccgaacggttttcttggatctaatcttgtttatgactacatgaatctgggcgagtcactctttggtgggcaggcaataaattctgctctcccaaataggcctgatcaaccagaatgcagatactttatgagcactgggacctgcaaatatggatctgattgcaagttccaccacccaaaggaaagaatgtctcaatcattgataaatccactcggccttcctgtgcgacctgggcaagctgtatgctcttattacagaatctacggaatgtgtaagtttggcccaacatgcaaatttgatcatccagttttgactatccctcagaactatggcttgacctcacctgctatgaatgtacttgatactcctctcaccagggggttatcaaatgtacaaccacctgagacatctccttctaaattaagtgacaagaagcttcagcattctgatgcaaaagctgctacagaagattcatccaaacaagatgatactacattgaattccttcccggcttccgcagagcctttacacaactaaactacttgaagtttgattcttttttcttttggatattttgttttcccccacattttcaggagaagtatatcatacataccatctattcccccccttttcacctgcaattctgtggagttggatagtttgttcagagatttttgtgacaaccactagcttgtggggaatggaaggcattttttgtgttgaataaaatgcaggtagaaactacttgaagtttgaattttttttctttcttttggacattttatttttccccacattttcaggagaagtatataatacataccatctattccccccttttcacctgcaattctgtggagttggatagtttgttcaaaggttgttgtgtcaaccactagcttgtggggaatggaaggcattttttgtggtgaataaagtgcaggtagaaagattttccaggtgcagatttttctggttattggttctccattgttgtttggcatgattcatggtttaaatggctccgatcatcgtttaatgatgatggctttgtgttgttttgctagggaatgtttgatattagatggtttttattcaacgatttttgtttcatttatgatatcatgcctttctttttatggtacgatgattctgatttggagaattctgatgattcacacaatgtattgtgagagacctatgacgattttttttggaaacat

SEQ ID NO: 29784 - DNA, 2290 bp, Glycine max
  Clone ID: TF_GmC1128_1
cggaaagagagagagaagctagagagagaaagagaccaaactaattagtgtagaagaaacagggagtctgtgtgggtgtgggtgtgggtgtgagagagagagggagagagaaagcagagaaaatccgaagcagttttctcacactttttgatcggaacctctcattccgcgttcagattgcgtcccccatttggtccttacaatggagcggtacgggcgggccagcgaagggtcgcagtctgatccgtcgccggaatggaccgtggccgccgacgccgacgccggcctcgaagagtcgtcgtggcaactcggattacccggtgctgaatcttaccctatgcgtcccgatgaggcggattgtatctactatttgagaacgggattttgcggttacggcacacgctgtcgtttcaaccatcctcgtgaccgtgccgcggttattggagctgcgccgaggactggaggagagtttccagagcgcgtgggacagcctgtgtgccagtactatatgaggacgggatcatgcaaatttggtgcgtcctgcaagtaccaccatcctaggcaggtgccaggcactgctacccctgtgccactaaattattatggatacccattgcgagtgggtcagaaagagtgttcctattacgtgaaaactggacagtgcaagtttggtgcaacttgtaaattccatcatccacagcctgcaggcgtccaagttctagcaccatcaccagttcctccagtttcacctctgcctgtacctgtaccttcaccaatgtatccaactgtacatcccccatctggtccttcacaacaacaatatggtgtacttgttgcaaggccacctatgctacctggctcagtagtccagggtccctatgggcctatggtagtgtcccctaccatggtccctttttcaggctggagtccttatcaggctcctgccacaaaccctctacttccatccagcactacatctaatgttggttctacacagctttatgggataacccagctaccttcatcagcagctacttatactggaccttatcaaccttctggttcttcaattggtccttcaggtgctagtcagaaggagcatccatttccagaaaggcctgatcaaccagaatgtcatcattacatgaaaacaggggactgtaaatttggcccgttgtgtagatatcatcatccaccagacaagagtgcaccaaaagcaaatgtaacccttagtcccgtgggtcttccattgcgtccgggggcaccaccttgcactcattatacccagcgtggagtttgcaagtttggttctgcatgcaaatttgatcatcctatgggatcactgagttatagtccatctgcctcttccctagctgatatgccagttgcaccctatcctgtgggttcctcaattggtactcttgccctgtcatctttgtcatcagagttgcggcctgaacttggtgcaggatccaacaaggagtctgttgcatcgagaatgtcttcaatgagcacatcgactggatcggttggcttgaccttgtcaagcgttggtcccatttctcactcaagcacccaaccatctgctcagagttccagttctccggaaactaccagtgctaccacaagtagcactgtatctcacacctcaagctaagcaatgtgaatgaattcctcattattactcctttttatgtcaatttttcaaccggccatcattactcgaggttctcaaataggttttatttttcaattatcccagctccacattcaggtctatagcacacattgcaccaattgtctgtgttcatataatctttttgtggccatccctttgatcttgaataaaccatggccaaccttgagaattttagcaacccatacacgcaccttgcttttgaataacttcaaaagaatctgcaactccattatgcacatgtccattcacatctccaattttcgtagtttgttgtgcttatctatgcttcaatctttttttatatgagaaaatttctgcccggagtttcattgacagtgtaatctctcttcacctgaaccctttttttgcaagtgggaataatctctagttctgcctggaaggtcctgtttgccactgttcccaacttatctaaggtttgaagtgaagagaagtaatcaggagactacaatgaggcttcacattgctatcttttgtgattttagatacacggtgatgttgtgacaagtaaaatgcttgacttggtactttattacacaatacatatatgaagaaacacatttaaattaacac

SEQ ID NO: 29785 - DNA, 196 bp, Glycine max
  Clone ID: TF_10236743
atacaagaccgaaatgtgcaagaattgggaattgagaggagcctgcaagtttggagacaagtgctgctttgcccacggtagacatgagcttaaaggaaaggcattgacccatgtcaaatataagaccaagcgctgctagcaataccatcattccggatactgcccttatggtctaagatgccagtatcttcataaa

SEQ ID NO: 29786 - DNA, 1195 bp, Glycine max
  Clone ID: TF_GmC16887_2
gtttagtttcgaaccctttccttttccttccttctccgcctcaccaccctaacccaaccctctctctttctctctccaaaatctctctccctcccaccgttatttagggtttggcagatctcgatccgtcacaatggacgttcgcaagcgcggaaggcccgacgtcaaccttaacggcgccgttaagaagaccaagcaagaattggagtccttatcaagtggtgtaggaagcaaatcgaagccatgtaccaagtttttcagtactgctggctgcccatttggtgagggctgccacttcttacattatgttccaggtggttacaatgttgttgcccatatgatgaatttaaaacccgcggctcctccaccaagaaccgttgctgcaccaccacccatcccgaatggttctgctccatctgctgttaaaacccgcatatgtaacaaattcaatactgccgaaggatgcaaatttggtgacaagtgccattttgcccatggtgaatgggaacttggcaaacctattgctccatcaattgatgatcatcatcatcatcgtcctttgggacctccagcaggtggtcgtatggctggtcgaattgagcctcctcccgctatggctggtagctttggtgccatttctaccgccaagatcagtgtagaagcttccctggctggagctatcattgggaagggtggtgtgaactcgaagcagatctgtcgccaaacaggagccaaactttcaattcgagagcacgaatccgatccaaatcttagaaacattgaactcgagggaacttttgaacagattaaggaagcaagtaacatggtaaaagatttacttttgaccgtgtcaatgtctgccccaccaaaatccaccccaggtgttcctggtgcccctgccccccctggaagcaacttcaagaccaagctgtgtgagaattttgcaaaaggatcttgcacctttggagagagatgtcactttgcacatggagctgctgaattgcgcaagtcgggagtatgattttgtttttccatttgtattagccaggctattattattatcatcattattgttgttgaagctgtgcattgctacttaatggtactgaaattaattcttgatgttatagttttgcagtactaagttatttttcaaaactacttttttgcgattgcaaatactgttctttttctt

SEQ ID NO: 29787 - DNA, 801 bp, Glycine max
  Clone ID: TF_GmC286_2
ctacatgggaaatatgaaccttgcaatgccgaacggttttcttggatctaatcttgtttatgactacatgaatctgggcgagccactttttggtgggcaggcaatcaattcagctctcccgaatagaccagatcaaccagaatgtagatactttatgagcactgggacctgcaaatatggatctgattgcaagttccaccacccaaaggaaagaatatctcaatcattaataaatccacttggccttcctgtgagacctgggcaagctgtatgctcttattacagaatctatggaatgtgcaagtttggcccaacatgcaaatttgatcatccagttttgactatccctcagaactatggcttgacctcacctgctatgaatgtacttgatactcctctcaccagggggttatcaaatgtacaaccacctgagacatctccttctaaattatcaagtgacaacaagcttcagcattctgatgcaaaagctgctacagaagattcatccaaacaagatgatactacatcaaattccttcccggcttctgcagagccattacacgactaaactacttgaagtttgaattttttttctttcttttggacattttatttttccccacattttcaggagaagtatataatacataccatctattccccccttttcacctgcaattctgtggagttggatagtttgttcagaggttgttgtgacaaccactagcttgtggggaatggaaggcattttttgtggtgaataaagtgcaggtagaaagattatgacccttcacgtatttc

SEQ ID NO: 29788 - DNA, 992 bp, Glycine max
  Clone ID: TF_GmC859_1
accccttccttaccctcgggcaataagtcgcgcagaggtcctacaagggaaggcattgtaagaagttttacacggaggaagggtgcccctatggagatagttgcacctttcttcacgatgagcaatcgaagaatcgcgagagtgttgctataagtttgggccctggtggttacggtggcggcggcggcggcggcggcggtgttggtggtggtgccagtggtggtaatggtggtgctaatgctgctgggaatgggcctaattcgaagccctctaattggaaaaccaggatttgcaataagtgggagatgacagggtattgcccctttggcaataagtgtcattttgctcatggtgccacagaattgcacagatatggaagcgggcttatagagggagaaaatttcgatgctgcttctgcagttgctggtgacacaaataagggagtgccttcaaaagcttctgccgataatgtggttgcagcagttactcttgtcgctcattctgatgtgtatcatattggagtcccttcacaaaggccttcttccatggtgattcagaggccaggacagagagcacatcagaagtggaaaggtccagataaaatcagtaggatatatggtgattggattgatgacatcgaatagagttttaatcccattcatggaaacgactgatgagggcttatgtactatcaaaacgcaatatttttcattcacatgttaatttttcttaagatccttaacttccaacgggaatagcattttagatcgtttcattgataactgttttgtaggtttatgcttggtggtgtattcaccttccttaatacgttgattctctggtgtctaaatgtagcaacatcttcccttgtatttgcatccgatagtatcccataatttttattttagcaaaaaaaaaaacattaggattgttttgctaccgcgtaggatctggttgtcctgatgcaatgaaaacccctttacgattttctg

SEQ ID NO: 29789 - DNA, 1432 bp, Glycine max
  Clone ID: TF_GmC1810_2
atcctttaccatcccggattctccctgccactacaaattcccaacttcgcaaaccctaggcagcagcagcagcagcaacaacaacagcaacgaagaattcgaagagaaatcaaatcgaatctcatttgatctgtgtgtggttgcggcggcggcaatggcggagcacttggcatcgatattcgggacggagaaggacagggtgaactgcccgttctacttcaagatcggcgcgtgcaggcacggcgaccggtgctcgcgtctccacacgaagccgagcataagccccactattctcctctccaacatgtaccagcgccctgacatgatcacccccggcgtcgacgcccacggccaccccatcgaccctcgcaaaatccaggaccacttcgaggagttctacgaagacctcttcgacgagctctccaagtacggtgatatcgaaagcctcaatgtctgcgacaacctcgccgaccacatggtggggaatgtgtacgttcagttcagagaggaggagcatgccgctaatgctgttaggaacctcactggaaggttttatgcaggtcggccaattattgttgatttttcgccggtgacggatttccgagaagctacttgcaggcagtatgaggagaatacttgcaaccgtggtggttattgcaacttcatgcacttgaagagaattagcagggaattgaggcgtcagttgtttgggaagtcccatggaaggcacagcagaagcagaagcaggagtccttacaggcatcgaagccatgaggagcggtctcatcgaagtcatagcagaaagtatgatgacagggaccaccatcatgagagtcgcagcaggagacacaggagcacaagtcctagacataggagaggacgaagtcgcagccgaagtcctggagggaggaggcaccatagtccggttagagatggcagtgaggaggccattgagcatggacagggaatgaacgagcagtttcaactctttgataggggtttttgttttcaatgtttaattaatttttcctcttggaatatgaagtagcatgatcttacgctgttatgagttttgcaggttcaggtatccctgcttcttgtaaaaaacgagccctttagttaattgcagtttaccgtggaatttgtgtacaggttcatggcttgctctttgaggatgttttaacggatctttcagctggcaagtaatcgtgtttgtaggaaaagccttggctggtttacttgctgcatttgtgcaggctctgaggaagatggcttcatttttataattttatttagttttctttttcctggcatattaggattttttagtgtgtaaaccttcgaacccaattgtgcgcttgtaaaattgttactttgaggaagcagcttttgaacgtttaatacattatcgacgtgcatgcatttccttgat

SEQ ID NO: 29790 - DNA, 1240 bp, Glycine max
  Clone ID: TF_GmC1700_1
cagaaggttcgttaaagtcgaagataaattaatgcaaagtagttagttggcagatagaagaagatcatcatcataatcgatccgttacaattagggtttctgattggagcataatagcgtattatcatctcatctctcagcagcagcagcatggcggagcaccttgcatcgatcttcggcacggagaaggaccgcgtgaactgcccgttctacttcaagatcggcgcgtgccgccatggcgatcggtgctcgcgcctccacaaccgccccagcatctcgcccaccctcctcctctccaacatgtaccagcgccccgacatgatcacccccggcgtcgacccacagggccagaccctcgacccccgcaagatccagcagcacttcgaggacttctacgaggacatcttcaccgagctcgccaaattcggcgaaatcgaaagcctcaacgtctgcgacaacctcgccgatcacatgatcggcaacgtctatgttcagttccgcgaagaggaccaggccgccaaggcgcttcacgcgcttcgtgggagattctacaacgcacgcccaatcatcgctgatttctcccccgtcacggattttcgcgaggccacgtgtcggcagttcgaggagaatagctgcaaccgcggcgggtattgtaatttcatgcatgtgaagctcatcgggagagatctacggaggcgactcttcggccgcaaccaccgcggtggcagtgggacctaccaccgcgtcagccggagcaggagtcgcagccgcagcgcgagtccgagataccgccgggagagacgggagagtgattctcgtggagggcggcggagcagggagagggacggcagcggtggacggaggagacaacacgggagccctccggccagggaagggagcgaggagcgccgcgcgaggatcgagcagtggaatcgggagagggaggagaataaatgatttcacgatgattctatgttcatttgcttgcgatagaataaaccatcaatttcatcatcaaactattattattaccctgtgtccctccttagtagtccttagagtaatgaaattagggtttaaagaatagatggagtacttaatgggcaccactgtagtctaatggaaaagatggtctgatatgttggatgattacttggcatgatttaagactactgaaatagctttttttttttttttttttgctagtcgaagaaagaggcgatagtggaaagggatgatg

SEQ ID NO: 29791 - DNA, 738 bp, Glycine max
  Clone ID: TF_LIB4390-016-R1-K1-H3
caaccttttgatcgaactcgaggaccatcaccgatccgttaattgttccccaccccgcttacaattagggtttccaaaaccctacactacacattgagcaaacgcagattcaaatcaattaatcactcactgactcaccaaattcatcaaatcaacactccgattcagctctcagcagcaccaccacgtcatggcggagcaccttgttttgatcttcggcacggagaaggaccgcgtgaactgcccgttctacttcaagatcggcgcgtgccgccacggcgaccgctgctcgcgcctccacaaccgtcccagcatctccccgaccctcctcctctccaacatgtaccagcgccccgacatgatcactcccggcgtcgacccgcagggccagcccctcgacccccgcaagatccagcagcacttcgaggacttctacgaggacatcttcaccgaactcgccaaattcggcgacatcgagagcctcaacgtctgcgacaacctcgccgaccacatgatcggcaacgtctatgttcagttccgcgaggaggaccaggctgcaaaagccctccacgcactccatgggagattctacaacgcgcgtcccattattgccgatttctcccccgtcaccgacttccgtgaggccacgtgtcggcagttcgaggagaatagttgcaaccgcggcgggtattgtaacttcatgcatgtgaagctcatcgggagggatctacggaggcg

SEQ ID NO: 29792 - DNA, 845 bp, Glycine max
  Clone ID: TF_GmC1810_3
ccacgcgtccggagaagacgacagaagggtacggctgcgagaagacgacagaaggggaggaaagggaagccaaagcgaaaccctaaccctaacggagagatggcggagcacttggcatcgatattcgggacggagaaggacagggtgaactgtccgttctacttcaagatcggcgcgtgcaggcacggcgaccggtgctcccggcttcacacgaagcccacaattagcccaacgttggttctgtcgaacatgtaccagaggcccgacatgaacatgaacatcatcaccaaccccgatcagccccagccccaatctctcgaccccgataaggtccaggatcacttcgacgacttctacgaagatctctttgaggagcttagcaagtacggccccattcagagcttgaatatttgcgacaacctcgccgatcatatggttggaaatgtgtacgttcagtttagggaggaagaccatgcagccaacgccctcatgaatctgactgggaggttttattcaggtcgacccatcattgttgatttctctcctgttacggattttcgagaagctacttgtaggcagtatgaggaaaatgtatgcaatcgaggtggctattgcaacttcatgcacctaaagaagattagcagggatttgagaaggaaattatttggaagaaataggcgatggaatggccgcagtggaagcagaagcaagagtcctccaaggaatcgtaaccatggggagcatttacattctggtcgtggttctggtagaagagattttgacaggtcccatggccaccatggtaggaggcctagaagccgtagtcctcgatatagagggaaacg

SEQ ID NO: 29793 - DNA, 1272 bp, Glycine max
  Clone ID: TF_GmC1810_5
cggacgcgtggggggaacccaaaccgaaaccctaaccctaacggagagatggcggagcacttggcatcgatattcgggacggagaaggacagggtgaactgtccgttctacttcaagatcggcgcgtgcaggcacggcgaccggtgctcccggcttcacaccaagccgacaattagcccaacattggttctgtcgaacatgtaccagaggcccgacatgaacatgaacattatcaccaaccccgatcagccacaaccccaatcccttgaccccgacaaggtgcaggatcacttcgacgacttctacgaagatctcttcgaggagctcagcaagtacggccccattcagagcttgaatatttgtgacaacctcgccgatcacatggttgggaatgtgtatgttcagtttagggaggaagatcatgctgccaacgccctcatgaatctcactgggaggttttattcaggtcgtcccatcattgttgacttctctcccgttacggattttcgagaagctacttgtaggcagtatgaggaaaatgtatgcaatagaggtggctattgcaacttcatgcacctaaagaagattagcagggatttgagaaggaaattatttggaagaaataggcgatggaatggccgcagtggaagcagaagcaggagccctccaaggaatcgtaaccatggggagaattcacattctggtcgtggttctggtagaagagattttgacaggtcccatggcccccatggtaggaggcctagaagccgtagtcctcggtatagaggaaaacgaagtagaagtccagtgggcagagataggagtcctccgatcagagaaagtagtgcagaaaggagagctaaaatagagcaatggaacagggagaaggaacaaggggacactggtaacatgaacaattcgaaaagcagtgatgattatcaagaacagagtgttgcacaaaatggtagtgaatctggtaaccatcagatatagcaacaacaacgtaatgatttggcccaaaatctgctagtaagtgtggcaagtaatctgatttgtgttgtttgcacctgcatttagatggattcagttgccattgttattattctatttggaattgtcaatttagtgatagaactttgtaatatccacagcaacaacattttaattttctgcttcaattgtaatgtcctgcaaggtaggaaggaaaatggaaaatgaagcgatacatttgataaagttcagctatgaatgtttcatattttgttatcgagc

SEQ ID NO: 29794 - DNA, 2125 bp, Glycine max
  Clone ID: TF_GmC1810_1
ccttcaccatcccggattctccctgccactacaaattcccaacttcgcaaaccctaggcagcagcagcagcagcaacaacaacagcaacgaagaattcgaagagaaatcaaatcgaatctcatttgatctgtgtgtggttgcggcggcggcataccgcaccgatccggagaagctcactggaagaaaaggaaaggagggagccgcaaaccgaaacccaagggaagccaaagcgaaaccctaaccctaacggagagatggcggagcacttggcatcgatattcgggacggagaaggacagggtgaactgtccgttctacttcaagatcggcgcgtgcaggcacggcgaccggtgctcccggcttcacacgaagcccacaattagcccaacgttggttctgtcgaacatgtaccagaggcccgacatgaacatgaacatcatcaccaaccccgatcagccccagccccaatctctcgaccccgataaggtccaggatcacttcgacgacttctacgaagatctctttgaggagcttagcaagtacggccccattcagagcttgaatatttgcgacaacctcgccgatcatatggttgggaatgtgtatgttcagtttagggaggaagttcatgcattcagcgccctcatgaatctgacatgggattcccttatattcggtcgtcacatcatagccgtacagctttataggtaatatagttcttgcagaaatgtcccttttctcaaccggttaattattaacattccaacgtatgttggtcttgtatgcttgttactgtggttgatttgcagttgttgaatgtatgcattattttacagtcaggtacactgatcaacatgaagactaatgaacgagcagtttcaactctttgattaggggttttttgtttgcaatgtataattaatttttcctcttggaatatgaagtagcaagatcttgacgttgttatgaggtatgcagattcagatatccggtgttcagagatcagagtcgcccgataggtaagaggagtacaacgcggagtcctcgaaaaggggaatagcgaagtagaagtgctgagggtagggatagtagcactccgatcagaaaaagtagtgcagaaaagagagctaaaattgagcaatggaacagggagaaggaacaaggggaaactagttacaagaaaaatacaaaaagcaatgatgattatcaagaacagagtgttgcacaaaatggcagtgaatctggtaatcatcagatatagcaacaacaacgttgaggtttggcccaaaatctgctatcaagagtggcaagtaatctggtttgtgactttgtcgtttgcgctgagttagatggattcagttgccattgtttttattctatttggaattgtcaatttagtgatagaaccttgtaacatccatagcatcaatgttttaattttctgcttcaattgtaatgttctgcaagggaggaagaaaaatggaaaaagcggcgagtttaacttgttgcgaggatgaagcgatacatttgataaagttcacctatgaatgtttcatattttgttgtcgagcatttattgtatgtcaccaatgttgaagggtatttagatggaaaacagatgaaatgatgtatgaatttcgactatgtgaatagctaaaggtttttttttgtgttaagtaaaaaaaaaaaaaaaaaaagcggccgctctagaggagggtataaggttaatgctgaggaaatcaataatggtaatgctagcaaacatcatgggcatcagcagcaggagcaggaaccgcaatcacctcaggagggacaatgatctgtttatgttgtaatggttcatggcttgctctttgaggatgttttaacggatctttcagctggcaagtaatcgtgtttgtaggagaagccttggctggtttacttgctgcatttgtgcaggctctgaggaagatggcttcatttttataattttatttagttttctttttcctggcatattaggattttttagtgtgtaaaccttcgaacccaattgtgcgcttgtaaaattgttactttgaggaagcagcttttgaacgtttaatacattatcgacgtgcatgcatttccttgataaaaaaaa

SEQ ID NO: 29795 - DNA, 668 bp, Glycine max
  unsure (1)..(668): unsure at all n locations
  Clone ID: TF_LIB4392-021-R1-K1-A7
ggaaatgttagccaaagcgaaaccctaaccctaacggagagatggcggagcacttggcatcgatattcgggacggagaaggacagggtgaactgtccgttctacttcaagatcggcgcgtgcaggcacggcgaccggtgctcccggcttcacacgaagcccacaattagcccaacgttggttctgtcgaacatgtaccagatgttctacatgaacatgaacatcatcaccaaccccgatcagccccagccccaatctctcgaccccgataaggtccaggatcacttcgacgacttctacgaagatctctttgaggagcttagcaagtacggccccattcagagcttgaatatttgcgacaacctcgccgatcatatggttggaaatgtgtacgttcagtttagggaggaagaccatgcagccaacgccctcatgaatctgactgggaggttttattcaggcagtatgaggaaaatgtatgcaatcgaggtggctattgcaacttcatgcacctaaagaagattagcagggatttgagaaggaaattatttggaagaaataggcgatggaatggccgcagtggaagcagaaagcagagtcctncaagggaatcgtaccatgggggagcatttacattctggtcgtggttctggtagaagagattttgac

SEQ ID NO: 29796 - DNA, 2390 bp, Glycine max
  Clone ID: TF_GmC1557_1
gattccctccagagagagagagagaaaatcagaacacgctttgaaactgaaagagagagtaagtgaaggtgtgtgtgtgagagagagaatcaagagagaggagaaaacagagacaaacgctgtctgtgcgagttagagagtgagagaaaccccagaaaatcagaaaatctaacccccattttttctctctctagtttccattttgatcggaggttctcattgtggttttccgattattcgtcgaatcagctccgttctccggttcggttcggtgcaatggagcagtacggccggtccagtgaaggttcgcggtctgatccgtcgccggaatgggccgagcccgaagcccaaaccgggctcgaagagcctgtgtggcaattgggaatgggtggtggtgctggggaggaatcgtatccgcaacgccccgatgaggttgattgcacttactatttgaggaccggcttctgtggcttcggttcccgctgtcggttcaaccatcctcgtgatcgtgccgtggttgccggagctgagaggactgcaggggagcatccggaacgagtaggccagcctgtgtgccagtatttcatgaggacaaggacatgcaaatttggttcatcttgcaagtaccaccaccccaggcaggcaggagcagggggcgctgctgctacccctgtgtcactaaattattatggatatccattgcgacagggtgagaaggagtgttcctattatgtgaaaacaggacaatgcaagtttggtgcaacttgtaaattccatcatccagttcctgctggcatccaaattccaccatcgccatttgccccagtttcacctttgcctgtaccagtaccttcgccgttatattcaaccatgcagcccccacctggtccttcgtcccagcaaattggtgtgctggttgcgaggcctcctatgctgcctggctcattagtccagagcccctatggacctgtggtactgtcccctgccatggtacctatttctggctggggtccttatcaagcttctgcatcaggtgctgttcttccttctggtactccatctaatgttggttcagcacagctttatgggataacccagctaccttcaccagcagctgcctatcctggaccttatccaccttctggttccccagttggtcctccaagcagtagtcagaaggagcaggcatttccagaaaggtctaaccaaccagaatatcagtattatctgaaaacaggggaggttaaatttggtccatcatataggtataaccctccaccggacatgagtgtgccggacatgagtacgccaaaagcaaatgtgattcttagtcctgcaggtcttcctttgcgcccgggactaaaactgaagtctgtggacgaatcaaattagggataaaccagccattgtctccttacattttctccagtagccaacatcagggggcaccagcttgcactcattatgcacaacatggagtatgtaagtttggttctgcatgtaaattcgatcatcctatgggatcaatgagttatagtccatctgcttcttccctggctgacatgccagttgcaccctatcctgtgggttcaacaattgctactcttgctccatcatcttcatcttcagagttgcggcctgaacctagctcaggatccagtaaagagtctgttccatccagaatgccttcatcaacattgactgggtcaatcggctcgactttgtcgactggtggacccatttctcaatcgagcactcaaccaccttcccaaagttcaggtcctttagccgctgtcactagcaccacaagtagcaatgtctctcacacctcaagctaagcaatgtgaatgcatacctcatcattactccttttttcaatctcaattcttccactggacataattattcaaggagatcctccaataggttttgttttcagttatcctagttccattctcaggtctagcacacttcacaccaattatctttgtgttcatataaactttttgtggccatccctttgatcttgaataaaccatggccatccttgagaattttagcaatccatacgatcaccttgcttttgaataactcagaatctgcaaggccattgtgcacatgccctttcacatctccaataggttgtgctgcttatttgtgctccaattttttttgatatgagaacattctgtccagactttcgtttatcatgtgtttatgtctcttcatctgaacccttttttaatttgggaacaattttccatttctgccttgtaagtcctgttcaacaattttcccaacttgtatctagggtttaatgtgaagagaagtaatcaggagactacaatgaggcttcacattgctatcttataatataaggtttagataaa

SEQ ID NO: 29797 - DNA, 1736 bp, Glycine max
  Clone ID: TF_GmC825_1
ggctgcgagaagacgacagaaggggggggaggagaagtttctctttcgaggaatggggtggtggagaaggtggcaaatgacaattcaagtgaataatggttcagaatgaaacctgagtgagtatgggagaacaacaacaacaaccacaacctcatcgtccctaatcctcaagattcactgtggatgatgaatttgaggactggggaaacaatggattctggatcttatccggagcgtccaggggagccggattgttcatattacatgagaacaggcctttgtagatttggtgcaacgtgtcgatttaatcatcctcctaacaggaagctggctattgccactgcaaggatgataggcgagttcccagaaagaatagggcaaccagaatgccagtactatctgaagacaggaacatgcaaatttggagccacatgcaaatttcatcatcctaaagatcaggctggaattgctggaagagttgccttaaatattttaggctatcctctccgccctaatgagcctgaatgcacttattatttgagaaccggacaatgcaaatttgggaacacttgcaaattccaccatcctcaaccaagcaatatgatgctctcattacgaagttctcctgtttaccctaccgtccattctccaactacgcttggtcagcagtcatatgctggaggaacatacattcctagtcctcgatggcaaggtccttcaagttatgcgcccttaattctacctcagggagtggtttcagtgcctgggtggagtgcatacagtggtcaaatggggtcaatctctacttcagacagtccacagcaagcaatgagaaacggtcaaacatatggaacttctcgtcaaggtgagcttgcaggatcacaaggggcatattctcaattccgttctggcaccgttcctgtagggttttatacattgcagagggagaacatatttcctgagagacctggtcagcccgaatgccaattctacatgaagacaggagattgtaagtttggcgcagtctgtcggttccaccacccacaagagaggctagttcctgctcctaactgtgtcttgagtcccataggccttcctttacgtcctggagaacctttgtgtgtcttctattctcgttatggcatatgcaaatttggcccaagttgcaagtttgaccacccaatggaaattttctctcataatatctctgcatctccttcagctgatgccccaagcaggcatctgttaggatcttcatctggaactgctgcgttaaatttatcttccgaaggacttgttgagtcaagctcagcaaagcccagacggctttcattatcagagacaagacagattccttctggtgatgatgacatcgatgatgatggatgatgatgtctcttgaaaatgggtcatttggcttttacaatttttttctgaggggggaaatgattaatctgtaaattgattttcccattgctggagatgtacagaggtcatgtcaggttgattctgtcattctgaaattaaatgcagttgacagattcaattattctggatttcatgttacctggctgatttgataaatttaagcaaatgttgtcacgtttggtcaatcccaacgtgaacaatccttctgtccttaagccacaactctttctaattaacttttcacattatgtaaaaagtgtttttctgaaaatctataatgatcagtatttggctctaaaaaaaaaaaa

SEQ ID NO: 29798 - DNA, 2290 bp, Glycine max
  unsure (1)..(2290): unsure at all n locations
  Clone ID: TF_GmC74310_1
attaaacctacacactctcttttacagtgaaagtgtgagaaaaacccgtgtctctctctcgggttcgcaacgaggagacaacaccggagctctccgatcttncagaacattctagagtggcaacgggattcattcttcgcttcaatggctcgaggcacactagagagtagagaccgtacagtcctagtcagagagacacacaacactacaccaaaccaacgcacgcttgtacagtgaagtgaagctgtggaaatttccttcgaggaaacaagacaacctcgccgatctcacggaacattctagtagcaaccaacgagaatcttcacttcaaacaaccaaacactaaatcgtttgcatggacttgtacggtcggggtcaggccagaaatggatccaacccggtgaaccagcctgaatgccgctcgccgggcaccgacactggcctcgaagaatcgatttggcatttaacgctgggatcaggtgaatcttacccggagcgacccggtgtgcccaattgtgtgtattacatgcgaaccggtgtgtgcggatatggtagcaggtgtcgttttaatcaccctcgcgatcgtgctgcggttgctgcggcagtaagagctacaggggactacccagaaagggtgggggaacctccgtgtcagtattatttaaagaccggaacctgtaaatttggtgcatcttgtaaattccaccatccaaaaaatggaggtggatatttaagccaagctccactaaatatttatggatacccgttacggctgggtgagaaagagtgctcctactatttgaaaacggggcagtgcaaatttggtatatcttgtaaattccatcatcctcaacctgctggcacatcattgccaacttctgcacctcaattttatcaacaggtgcagtctcctacagttcctcttcctgaacagtatggaggagcttccacaagcttgagagtggccaggcctcctgtattgcctggttcatatgtacaaggggcttatggtcctgtacttctttctccaggggttgtccaatttcctggatggagtcattattcggcacctgtaagtcctgtgctatctcctggcgctcaacctgctgttggggccacttctttatatggagtgacccagttgtcatccccaacatcagcttttgctagaccatatactcctctgtcctctactaccgacccttcaggaagcaacccgaaggatcaattttttcctgaaagacccggtgaacctgaatgccaatactatctgagaacaggggactgtaaatttggattagcttgtcgatatcatcatcctcgggatcatattgtggcacggccacttcttagccctgttggacttcctttacgtccggggttacaaccttgtgcattttatttgcaaaatgggcattgcaaattcggctccacttgcaaatttgaccatcctttgggatctatgagatacagtccatcggcatcttctctcatcgatgtgccagtcactccatacccagttgggtctttgctgtctcagttggctccttcaacaacgtcttcagaccttcggcctgaactgatgtcagggtccaaaaaggaatccttttcagccagaataccttcttctggaaatagttctggtacttctgtcggtctaattttctcacaaggtgggtctgtctcgctatttgatgtgcaactctcaagtcagagtaatgcccctccaaacagtagcagaagcaccagacaaagcggtgaaatacgttgacctgactcgtacaaacttgaaaataagtcctcgttatatattggatgtgatttcacaagccttcattacttctgtctatagtcctcagtattttgatggcaactgttcaaagtttctctatcgctgttgagaattcatcgtccaattctgtttagaagccatactaggtcattattctcttttatgcttatgctcaccccatctgattatattattatctcaaataagcttcaatagaaaactcattttggtctttccgtcccccctccggatttttttttttttccctctattgagcgggcttttgacagcccataaaaaaaatgggtataaatcacgctccccacacgagcctttttggcttgacatgtggaattcaatttcttatttagaagaaagggatagctaagattgaactcatggtcacatggtcatagaagccatcatttcatgtcaaaaaccccccttcgtaaatagtttaagctgttgaataaaagcatgtgattcccctctttttcc

SEQ ID NO: 29799 - DNA, 920 bp, Glycine max
  unsure (1)..(920): unsure at all n locations
  Clone ID: TF_GmC122_2
atctaaacacatattctttggattaaatatccttaattcttttcattcatatgaatcagttgcaagtatggtgtcacttgccgctacaatcatcctgacaggaatggtatgtataatatattgatattgattgttcttacattttcctgtttcctaaacaattattttgcattatcattctttgatgcagcaatcaatccacccattgctggattaggcgcctctatttttccatcctcggctgctaatctgaatatcggacttcttaatccagctgtttctgtctatcaagcttttgaaccaaggctgtcaaatccaatgtctcaggtgggaattgcagacactatctatccccagcgacctggacagattgaatgtgatttttatatgaaaactggcgagtgtaaatttggggaaagatgcaagtatcatcacccaattgaccgctcagcaccatcactgtcaaagcaggctacagtgaaactcactcctgcaggattaccaagaagagagggtgctgttatctgcccatattatttgaaaactggaacatgcaagtttggtgcaacctgcaagtttgaccacccaccacctggagaagttatggagatggcaaaatcacaaggaacatcggccaatggaggggaagcagaaggcgatgaaatcgagacttctgctcaactttgagatctttcatgaaaactagactctatttgatgatcccttttagtttttccttatatttcttttctaatcatgatatgaacagttgtggctgaagacctgctttgtttactttagtgactagtttatctctggactggtatgaatgctttttttaatggttagttgaattacaagatttctataccaaanaaaatataaaaaaaaaaaaaggggggtggaggaaacacaaaaga

SEQ ID NO: 29800 - DNA, 943 bp, Glycine max
  Clone ID: TF_GmC86_1
aacctcaccacgccatcgccgttttccctcgacacaaccgaagcgctcttccatcgacacctccaacacctccaacactctcttgaacagcagcaatcatggccaactacctcgcctccatcttcggtaccgagcaggacaaggtcaattgctccttctactacaagattggcgcctgccgtcacggcgaccgctgctccagaaaacacgtcaagccgtcgtactcgcagactatcctgctgcccaacctctaccagaacccggcgtacgaccccaagaacaagatgaacccgcagcagatgcagatgcactttgatgcattttacgaggacatctggtgcgagctgtgccagtatggacttgctgaagagttggttgtttgcgacaacaacaatgaccatctcatcggcaatgtctacgtccgattcaagtacgaagaagacgcgcaaaaagcctgcgacgccctcaactcgcgctggtatgctggtcgtcccatctactgcgaactctcgcccgtgaccgatttccgcgaagcctgttgtcgtctgaacagtggcgaaggctgcgtccgcggcggcttctgcaactttattcatcgcaaggaaccaacggccgagctggacagagagctggacatgtgcacgcgcaagtggttgaaggagcgtggcagggacgcgaggagtatgtcaaggagtcctacaccgcctgcgacgaagaacaggttctagggtagatatagagtgggaagcgtgagacacgggctgaatacgaagggcgttttggtgttatacatgctcgcacagtttgggacatgttggttgatacctcgatatccgtagcgggcatggcgttgcaaattggcatttgtaaattagctttggtaaaatagtgaagtgtggataataggctagactaggctacgcaaaagcgatcatgtcagttc

SEQ ID NO: 29801 - DNA, 2272 bp, Glycine max
  Clone ID: TF_GmC122_1
cccacgcgttcgcacgaagaaaaaaaggcattgaaagcaagaaaagaagcaaacattattctcgtgagtgcatgcctgagtaactgagtgagtgagtgagtgagtgagtgtaacatcgttttctcgtttgtgttttttcctttaaaatggaaaaccacatctacgcctcctcttacagcccttccaccaactacagatccttccgtgacccccccgccgacaccatgttcctctcccaccacctccaccaccatcgcaccgacgcctcctccgccgccgccctccgcttcccctcctcggccctctctgccgtcgaagccgccgatattgccccgcctggcgtcacctcccgaatcgcctcctcctccgccgccgccgacgacgagaatttcctttccacctggccccctgccgccgccgccgcgcccttcgccctcgacctcaaacgctcttccgaagctctctaccatccaaccattttgggtacaattgggcaaagtgaagcttggtattctacaaacccactggccaagcgccctagatatgaaagtgcttccaatatgactatatatccacagaggccaggcgagaaggattgtgcccactatatgctcacaagaacctgtaagtttggagacagctgcaagtttgaccatcctttttgggttccagagggtggaatcccggattggaaagaggttccaattgttacaagtgaaactccacctgagagaccaggggaaccagattgtccatactttctgaaaactcaaagatgcaagtttggttcaaagtgcaaatttaatcatcccaaagtttcctcggaaaatgctgatgtttcttctggcttacctgagaggccatcggagcccccttgtgcgttctacatgaaaactggaaaatgtagatatggtgctgcttgtaaattccatcaccccaagggagatagctgcaaatttgaccatcctgtttgggttccagagggtggaatcccggattggaaagaggctccaaatgttgttacaagtgaaactcctcctgcgagaccaggtgaaccggattgtccatactttctgaaaactcaaagatgcaagtttggttcaaagtgcaaatttaatcatcccaaggtttcctctgaaaatgctgatgtttcttctggcttacctgagaggccatctgagcccccttgcgcgttctacatgaaaactggaaaatgtagatatggcactgcttgtaaattccatcaccccaaggatatccagattcagttgtctgacgacttgagtcaaaatgttgcacagacacaaacaaattctatgatgggtggagctacaggagatacacagccaattaaatctcttatatctccgtcgttgcaaaatagcaaagggcttccagtaagactgggggaagttgattatcacccatacatgaaaactgggacatgcaagtatggtgtcagttgccgctacaatcatcctgacaggaatgcaattaatccacccattgctggattaggtgcctctattttgccatcctcggctgctaatctgaatattggacttcttaatccagctgtttctgcttatcaagcttttgaaccaaggctgtcaaatccaatggtgggaattgcagaaactatctatcctcagcgacctggacagattgaatgcgatttttatatgaaaactggcgagtgtaaatttggggaaagatgcaagtaccatcacccaattgaccgctcagcactgtcactgtcaaagcaggctactgttaaactcactcctgcaggattaccaagaagagagggtgatgttatctgtccttattatttaaaaactggaacatgcaagtttggtgcaacctgcaagtttgaccacccaccacctggagaagttatggagatggcaaaatcacaaggaacatcagccaatggagaggaagctgaaggcgatacttctgctctggaacaactttgagatctttcatgaaaacttgactctgtatttgatgagcccttttatttcttccttatatgttttttctgatcatgatatcaacagctgtggctgaagacctgctttgtttaatttagtgactaatttgtctcttgattggtatgagtgctgttttttaatggagtgttgctaggtgcacccagctttatggttagttgaattacaagatttctattcttaaatgtcctaaaaaaaaaacccgaatgggctaaaggcaaataactgggcaccaacacaaaatgggcggccgccca

SEQ ID NO: 29802 - DNA, 1363 bp, Glycine max
  Clone ID: TF_GmC16887_1
gaaggctcccatacccggtcacagcggtgactcttttggttttcccccctctccttgctccttgctccaaaaccccttattcagggtcaccgctgtcagggttagggtttttccaccttctttatttaccaatcttcttctactaccacttttccctcgttccctctcttagtctcttcaattgtaagctttttgcgctagggtttcctctgcaatctcttgtacttgaagctcgttccttcttccggatctcgatctatggatacccgcaagaggggaagacccgaacccggcttcagcttaaatggcggattcaagaaatccaagcaagaaatggagtccttatcaactggtgtaggaagcaaatcgaagccatgtaccaagtttttcagcactgctggttgcccatttggtgagggctgccacttcttgcactatgttcccggtggttataatgcagttgcccatatgatgaatctaacacctgcagcacctccagcatcaagaaatgttgcagctctgcctcctgtaccaaatggttccgcaccacctgccgttaagacccgcatatgcaacaagtttaatactgcctgaaggttgcaaatttggtgacaaatgccattttgctcatggtgaatgggagcttggcaagcatattgctccatcatttgatgaccatcgcaccatgggacccactggagtaggtcgtcttgctggtcgaatggagccccctcctggccctgctgcaagttttggggccaatgccacagccaagatcagcgtagaagcttccctggctggagctatcattgggaagggtggcgtgaactcaaaacagatctgccgccaaactggagccaaactttcaattcgagagcatgaatctgacccaaatcttagaaacattgaacttgagggaagttttgagcaaatcaaagaagcaagtaacatggtaaaggatttacttttgaccctgcaaatgtctgcaccacctaaaacaaccccaggtgttcctggcgcacctgcctctcatggaagcaattttaagacgaagctgtgtgagaattttacaaaagggtcttgcacgtttggagatagatgtcactttgcacatggagctgctgaattgcgtaaatcaggagtatgaactttcttagtcaggcacattagctagggttatgattattgttgttgtgcattgctactgacaggacttctgatgttagttttgttgttgagttgctttacataacttgttttatttccgatttcaactctcgcttatatcatgaaactggtgttttctctaggctaccccatttggtcccaaataatgctatgaaaatagtgtgattttagttcc

SEQ ID NO: 29803 - DNA, 1319 bp, Glycine max
  Clone ID: TF_GmC1136_2
tgatgatggttggaatggtggtggtgatgaggggtgtgattgtattgagaatgtgaatgtgaatgagagtgagagtgataaggtgggtggagatgttgagggagttaaaggtgataggagctcttctagagctcaacaattccctttgaggccagaggctgaagactgtgcattttatctcaaaactgggacttgcaaatttggattcaattgcaaattcaatcatccgctactggctcttgcaagtgcgcatgtaataggggcactctctttcccccggacgaataggcaggccaagaaagagagtgcccctattaatggcggctcttgcaagtttggagcaaactgcaagttcaaccatcctgatcctacagctgttggaggaggaggaggtaatcctccttcagggtatggtaatggagggtctatttcattacaaggtgtatcacaaacatctgtaccctcctggtcttctccaagaacattaaatgaagcatctccttttgtgccaatgatgctttcacctactcaaggagtttctacccaaagttctgattggaatggatatcaggcatctgtctacttacctgagaggagcattcatccaccttctacatttgtcatgaacaacccagcaattgatacaaatgtttacatgcaccatcaaaagcagatgcctgttgatgagtttccagaaaggcctggtgaacctgaatgcagcttcttcttaaaaactggggattgcaagttcaaatctaattgtaaatttcaccatcccaagaatcgggttacaagattacctccatgcaacctcagtgacaagggtctacctttgagacctgaccaaagtgtctgctcacattacagtcgctatggaatttgcaaatttggaccagcttgtaagtttgaccaccccgataaacttgcagcccgtgatgattcctggacttgagcaacaatcctactcaaactcagctagtgctggggtggctgggataggtggaagtacaggcgtaactgatgcgacaattcagcaatctgtgtaaacatgtttgtctgaggatcttcttgctttgaggatgcatatcaccccaaattgttttcttcttaaacatgataaatttattttacttttcctagccctgtccaatgcagcacaagctttgcaaggaatagctgacatataatatatatcaaacagtttttatgtatttattacaagtaacatctgcatctgtagattatctcttgtttatggtttgttttctgtcagttggatcagtgttggataataattagactgttttgaaatggttgtc

SEQ ID NO: 29804 - DNA, 1459 bp, Glycine max
  Clone ID: TF_GmC31054_1
attaatggcgaagctgagccaagattcccattaattattagttatcatgtagcaaattagaagctgtttgataaaaatttgaaaaactaataattaatggcgagtcttggcagcttctgcacaattcaaacctcgttaaaaaaaaattataacactgacccacgggtccgtcccacacatatataacgcgctggctgggttccgtgatacgatatgatgtccatagatctaaccttgcgaaggtcggtcccttcccacacatatataacatactgactggatgaggtaagaccagataacatgcggtccgacacgtgacgttcattctgtctgttggaactgttggccttttagggttagggtttcggtttgtggatctattgttgcctctgcgatggatcgcaagaggggaaggcctgaagctgccttcaatttcaatggcggcgccaagaaatcgaggcctgaaacggactcctttccaactggtttaggaagcaaatcgaagccatgcacaaagtttttcagcacctccggctgtccatttggtgaaggatgccacttcctgcattatgttcctggtggctttaaagctgtctctcaactgatcaatgttggtagcaatcctgttactcctcaagttgggagaaaccctgttccaccatccttccccgatggatcttctcctccagttgttaaaacccgattgtgcaacaagtttaatacagctgaaggttgcaaatttggtgacaaatgtcactttgcccatggtgagtgggagcttggcaggcctacagccccatcatatgaagatccccgtgttttgggacaaatgccaagcagcagggtaggtgggcgagttgagcccccacatccagctcatggagctgctgccagctttggagcctcggctactgcaaaaatcagtatcaatgcttccttagctggagctgtcattggaaaaaatggtgtcaactcgaagcaaatatgtcgtgtaacaggagctaaactttccataagggatcatgacacggatcctaaccttagaaacatcgagcttgaaggcagttttgatcagatcaaacaagccagtgccatggttcacgaagttattctaaatgttagttctgcctctgggcctccaatgaaaagctttacttcgcagacttctgcccctacaagcaacttcaagactaagctgtgtgaaaactttgccaaaggttcctgcacttttggggaaaggtgtcacttcgcacatggaaatgatgaattgcgcaagtctggaatgtgatagcgttataatttttttttagcgaggtttgaattgtgcagaattttctagtttttcaatttttttatcaaacagcttctaatttgctacatgataactgaactaatggtgagtcttagctcagcttctaaaattcaacgcacattcaaatttgaaatttcctattgtcaa

SEQ ID NO: 29805 - DNA, 920 bp, Glycine max
  Clone ID: TF_GmC16887_3
gtttaatactgctgaaggttgcaaatttggtgacaaatgccattttgctcatggtgaatgggaacttggcaaacacattgctccatcatttgatgatcatcatgccatgggaccccctggagcaggtcgtcttgctggtcgaatggagcctccgggtcctgccgcaagttttggtgccaattccacagcgaagatcagcgtagaagcttccctggctggagctatcattgggaagggtggtgtgaactcaaaacagatctgccgccaaactggagccaaactttcaattcgagagcatgaatctgacccaaatcttagaaacattgaacttgagggaagttttgagcaaatcaaggaagcaagtaacatggtaaaggatttacttttgaccctgcaaatgtctgcaccacctaaaacaaccccgggtgttcctggtgcacctgcctctcatggaagcaattttaagacgaagctgtgtgagaattttgcaaaagggtcttgcacgtttggagatagatgtcactttgcacatggagcttctgaattgcgtaaatcaggagtatgaactttcttagtgaggcacattagccagggttattattattgttgtgcattgctactttagcagtactgacagtactttcgatgttagttttgttgttgagttgttttaggtcccaattgggatgtttgggatgatttttttttttcagttttgaaattattaaaaaccaaacttagtttatgttttgaaaaaaaaaaaaaaaaaaaaaaaaaaaaaaaaaaaaaaaaaaaaaaaaaaaaaaaaaaaaaaaaaaaaaaaaaaaaaaaaaaaaaaaaaaaaaaaaaaaaaaaaaaaaaaaaaaaaaaaaaaaaaaggggggggggccgttttaggggaccaaattttacttcccggg

SEQ ID NO: 29806 - DNA, 467 bp, Glycine max
  Clone ID: TF_GmC104291_2
ggttgcagagaaaaatatggagggaaccgcaacagggtgttacaagtgcggcagacctggtcactggtcacgggattgccctttctccgctcccaattccaatcctaaccctaaccctaaccctaaccctaaccccgccaccactcccaatccaaatactccaaatccttcttcctcttctttcaagcccagattcgccgccgaaaagcccaagaaactcccccgaacaaagcctaagctcacaccggagcttcttctctccgacgagggtctcggttacgtcctccgctacttccctcgcgagttcaaataccgtggtggtggccacgaggttcgcgatttgggtaacctgcttcgtctgtacaccgaatggcactctcgcttgctcccttattactctttcaatcagtttgttcacaaagtggagaaagttgctgctacaaggcgtgtaaagacttgccttagag

SEQ ID NO: 29807 - DNA, 2058 bp, Glycine max
  Clone ID: TF_GmC18165_1
ggctcgagaaaataatagaatttctagggctttataactctccattgtctcttccgatcagcccggaattcggctcgatctttcgattgaactcatttctctcttcttcgccacgcactcttgtctctgtaagcggtgattttggttctggacaatgtctcgtgtttatgttgggaatttagaccctcgagtcagtgagagggacctcgaagatgaatttcgtatatatggtgttcttaggagtgtctgggttgctcgaagaccaccgggatatgcatttattgagtttgatgataggagggatgcacttgatgcaattcaggccttggatggaaaaaatggttggcgtgtagagctttctcataattccaagggtggtggccgaggagggcgtgggcgtggaggtgaagacacaaaatgctatgaatgtggtgaacctggacactttgctcgggagtgccgattgcgcattggatcacgtggccttggaagtggaaggaggcgaagtccaagtccttatcggcgtcgtacaagtccaagttatgggtaagctacagtcctcgtgggagaagatctccaagacgacgtagcatttcacctccctggggtcgcaactacagcaggtccccttcatatcgtcctctccgtgatttcccttatgccaatgcagattaaaatcagaatgtgaacggagcaagtgctgaatagttgttaggatgttctctctgctatagtgtagttcctctaggattggttgagcataccacagacatgttagttatgttgatgtcatgacaatgggtattgttaagaacttggcttttgatggaactacatagggttgtagctggcaaaagggtgcgttggacactgttttgcattggctgtctctcttcagcttactgaaacctgaaggttgcttcagtcttccctactttatatagcatgttatgttaattgtttgttataaaaaaaaatatttctaatccactagggtaattttgatatatttgcattaaaggtgcctaaaatgttcatgtttctttgttttgaggtgtgattatcggccaaaacagcatcgtttcaccacttactacatcttgtctgcttctctgcttcatgcccccacaatcgtctcatcttgttgcttctgcatataagttgactaaaggttcgatgtcaacaagttggttgcatatgacctttttgcttactgttcaggaaagaatgctacatatgcatcctacttatgatttggaggagtctaaaggtggatggataaatgtagtcattggcttgctgcatctttgtgaaattaagttaaattggggttcctttagcgagtaactgcgtgtagtgtctgcttcacaccattctatatagttatattgatggttgctgcttctaattgtctgcatttgattaaaatgctacttgtttcatccgtggtctctggtatatgcttgccgtttgggagcaatggtcatcatcttggttgtgtaggacactgtattgtgtatcctccttcggcaaaatcacctgttgatctatgatctctgaggactgggactagaaagagtgattccatttaaccaattgagtactcgccaaatgtttttcattctccacttgctgctctttggtctgtgtccacagtttcctcatgtggctgattaacttttgcatgcttctgtatggaattgtgtgtcatcttcagctactggaatccgtgtcactttgtctccaatctgaagttttgttttgctaaatatcgtccgctcctaatcaagtgtattaactctggttgattggcagcattggttgcattagatatttgaatttgaggaattcattgcttcttgcccttgttttagaatgtgagttaagtgttgccactggcatttagctccactaagattagttgattttgatctggttaattatgttttaagaattaagtactgtttttttttgtgcaaaagaagtattgacttgggattgactaaatgagaaaactaaaatgtggaaatgatttttgttttttctataaaaaccccc

SEQ ID NO: 29808 - DNA, 736 bp, Glycine max
  Clone ID: TF_GmC18165_2
ggctcgagaaaataatagaatttctagggctttagaactctccattttctcttccgatcatccagaatcctcgagaattctttttgttgaactcacttctctcttgttcgccacgcactcttgtctctgcaagtgtaaggattcagtgtctgggttgctcgtagaccaccaggatatgcatttattgagtttgatgatcggagggatgcacttgatgcaattcaggccttggatggaaaaaatggttggcgtgtagagctttctcataattccaagggtggtggccgaggagggcgtgggcgtggaggtgaaggcacaaaatgctatgaatgtggtgaacctggacactttgctcgggagtgtcgattgcgcattggatcacgtggccttggaagtggaaggaggcgaagtccaagtccttatcggcgtcgtagaagtccaagttatgggtatgatcgcaggagttacagccctcgtgggagaagatctccaagacgacgtagcatatcgcttccccggggtcgcagctatagcagaatgtgaacggagcacgggctgattgctgaacaattattaggaagttctctctgctataagtgtagttcctctgggattggttgagcataccacagacatgttagttcttgtgatgtcatgacaatgggtattggtaagaacttggcttttgacaaaactacatagtgttgtagctgccaaaagggtgcgttggacactg

SEQ ID NO: 29809 - DNA, 803 bp, Glycine max
  Clone ID: TF_GmC18165_3
gaaaccccgcggcgacccacgcgtccgcttcaatttcccttccgatcatttttattcctcgagatttctttcgattgaacggatggctctcttcttcgccacgcactcttgtctctgtaagcggtgattttggttctggacaatgtctcgtgtttatgttgggaatttagaccctcgagtcagtgagagggacctcgaagatgaatttcgtatatatggtgttcttaggagtgtctgggttgctcgaagaccaccgggatatgcatttattgagtttgatgataggagggatgcacttgatgcaattcagcccgtggatggaaaaaatggttggcgtgtagagctttctcataattccaagggtggtggccgaggagggcgtgggcgtggaggtgaagacacaaaatgctatgaatgtggtgaacctggacactttgctcgggagtgtcgattgcgcattggatcacgtggccttggaagtggaaggaggcgaagtccaagtccttatcggcgtcgtagaagtccaagttatgggtatgatcgcaggagttacagccctcgtgggagaagatctccaagacgacgtagcatatcgcttccccggggtcgcagctatagcaggtcccctccatatcgtccttctcgccatgattcaccttatgccaatgcaatgtgaacggagcacgggctgattgctgaacaattattaggaagttctctctgctataagtgtagttcctctgggattggttgagcataccacagacatgttagttctgttgatgtcatgacaatgggtattg

SEQ ID NO: 29810 - DNA, 664 bp, Glycine max
  Clone ID: TF_GmC629454_1
cgcaaccttcctggtttcaatccaaatactcgtcattgtttgtatgggttggatgctgatttgattatgctctccttagctacacatgaggttcacttctcaatattgagggaggtagtcactttccctggtcaacaggagaagtgttttctgtgcggccaacctggccattttgcagctgattgtcgtggtaagccaggtgagaaagctgaggactggaatcctcctgaatgaataccccatttcacaagaagaaatatccagtttcttaacatctgggtgctgcgtgaatatttgcaatttgaattggagatacccaaccctccttttgagattgactttgaacgagtagtggacgattttgtatttctatgcttctttgttggcaatgattttcttccgcatatgccaacatatagagatccgggagggggctttaaatttattgatgcatatttacagaaaggaattcaccgccatgggtggttatcttactgatgcgggcgaggttttcttagagagagtgcaacattttattcagtctgttgctgttcatgaagatcaaatatttcagaaacgagttcggattcaacaggctacagaaattaatgaagagatgaaagctagggcaagaggagacatgcctggagaacacgtgcttagt

SEQ ID NO: 29811 - DNA, 1527 bp, Glycine max
  Clone ID: TF_GmC5288_3
ggagagatgtgtgtaaaatttgatgcatctccagtcatatgttttgagcatccgctatctatgtaccacttctttctcaaagatacctacataatcaagtttttgacttaggtacccaaactttattgggtccttgcatgttagtataaactgaggatccttttggaacccatatcattttaatgttactgtaatttttcttgaagtagcaagttgatatgccatgtcctcttcttccacagtaaaaacaagtgatagaattagaattacatttttgtgtggaagtggaaaagtttttatgaaacttttgttgtttttcagatttatatcctagtccatttttattagacacatatctttgtttacttaatataacatctaaattatttttactatatgaaaattttgcaagtgaatttttcaactctttaatttcttttacatatttatcacaacaactacaagaatctgatattttcttgtcagaaatagtggagatattaactttttcatttgttttagagattgagacttcatttctaagaagatctaattctttgtttaattttgaaatttcattttctaaatttgaaattgttttctttgatgatgaaactaattttgcaagtttaattgattctttatgcaaatcagcaaatgcatcttgcaattcatcaaaagaaatagataagttgtttgaagatgttacctcttcatcactttcgtaactttttgccataaggcaaagatttatctcttcattttcagaatcatcagaggattccaaatcattttcatcccatgtgatgtatgctttctttagtttcttctcactatgatttttcttttcagatttttccatctttttcttgaagatgggacaatcaaccctcagatgtccaggttgattgcattcaaagcattttagagtagaggatgaattttttgttcttctctttgatttaaaatttggtcgcctctgatttcctcttactttaagaaatttgttgaatctttttacaaagaaacttagatcatcatcatcatctgcatcattatcctgatcactttcttcttgaattgaggatgatgctttaagagcaattcctttctttttcttgtcattttcttcattttggtgcaatctcaatagttccatctcgtgttcaagaaggctggagaaggaaccgatagcaatgacgaggaatcgacccaagtaagaatctgagagaaaggccccaaataaggataagacgtcggatgcggcagtccaagtgtaaattacgcttgtgcccttcgcaataggcatgaggtaatcgtccctcagatacaatatcatgttgggcatgattccgtaactcgcaactttctccagacattcgttcactatgatgaagggcatggttcgcaagccaccttttttgatttgagaagaagaagtgccattttctaagagcttctcgttcgcggcatcagaggacttcatcatcgttttttctttttctgggatacgatgttgatgaattg

SEQ ID NO: 29812 - DNA, 172 bp, Glycine max
  unsure (1)..(172): unsure at all n locations
  Clone ID: TF_LIB4392-013-R1-K1-A12
ggatacatgnggattttagtcaaagtgtggcaacactgtggtcacaatacaggcggaaagatcaaaagggtaaaggtggtggttgcttcaaatgtggttctacagatcatattgctaaggattgtacgggagaggctacnatgaaacaaccacagcaaatacatcttaagga

SEQ ID NO: 29813 - DNA, 747 bp, Glycine max
  Clone ID: TF_GmC10165_2
gtgatttctatgggaagttttccgacagagatagaagtaaccctagaggttctagggatcagagaggttttagaagttcacgaggacgggaaggaggccaagactctaatgatgagtttggacgaggtggtagaagtttcagatctggcaacaacaggtctcgaacaacgggaaaaagcagcggcaatgattggctaattggaggcagtagtagatcaagcaggttttcatcatccaacagagatgggggccatggaggggcctgttttaattgtggaaaacctggccatcgggcatcagattgtatcacccaaaaacgagtctttttctagtttggacatttttcgctttgacaccacctagtccaagaattgagctcccactggtgatgccctaattagttcaagaaattgaaagatgctatccccgaaagaattacagaatgtgcactacgttacatatctcttgtttttttagtattctatagaggtctcccccttctgtcttagggttttgtttttctttacccttgttgtaatttttttatttatcatttacattgcggattcaagatagtattttttttttgcaagaacagtaactatacgatgctgttttgtcagcttaacaatcatgtttctttacccttgttttatgaaaatggcagaataggctaatagccttatatgtagaatacgcttccatctgctcatgatattacaacaatacaaattagtccttcgccac

SEQ ID NO: 29814 - DNA, 1660 bp, Glycine max
  Clone ID: TF_GmC137024_1
gcgcccacgcgtccgcccacgcgtccggttgaaaagcaaataccttagcacattgctttcagcaacttcttttgatgctgatggagggttgtttccacttgcttttggtgttgttgatgtagaaaatgatgacagctggacatggttcctgtctgagttgcataaggtacttgaggtgaatactgaatgcatgccagagtttatatttttgtcagatgggctaaacagtattacagatgcagtaagaaggaagttccctagttcttctcatgcattctgcatgcgtcacttgaccgaaagcattggcaaagagttcaagaactctaggcttgtccatcttctgtggaaggcttcatattccaccacaaccattgcatttaaagaaaaaatgggtgaaatagaggaggtttctcctgaagctgctaaatggttacaacaatttcatccttctcaatgggcccttgtacattttaaagggactcgatttggccatctatcctctaacattgaggagtttaataaatggattcttgacacccgggaattgccaattattcaggtgattgagcggattcatagcaagcttaaaactgagtttgatgacaggcgtttaaaaagcagctcatggtgctctgtacttgccccatcagccgagaagctaatgactgaagccattgaccatgcatctacatatcaagtccggctcgatgatgaagtagagtttgaggttctttcagccgatcgatcagatattgtaaatattggcagccatagctgttcctgccgggattggcagttaaacggtattccatgttcccatgctactgctgctcttatctcttgtcgaaaggatgtttatgcatttacccagaagtgttttactgctgcaagttacaggaatacctacgcagaagctatacaccacatcccaggaaaacttgaatggagtaaaacagatgataagtcttctatggatgataatatccttgttgtaaggccaccaaaattacgacgaccaccgggacgccctgagaaacagatgtgtgtggatgaccttaatcgagagaagcatacagtgcattgtagtcggtgtaatcaaactggacattacaagagaacttgtaaagctgagatgattaatagtatagagcagttttagttgtctgattatgtactaagtggttcaccaaagaactagtttagttttaacatctagaggccctatgtttaggacattcctatgatgcagatcatgtagaagttagatatacatcactgtattaaatccgcggtgtaatagaaatgaagtttacaacattggcaggtttgtaatcgccctgagaaacgaatgtgtgtggatgaccttaatcgcgagaaacatacagtgcattgtagtcggtgtaatcaaactggacattacaagagaacttgtaaagcagagatgattaatagtatagagcagttttagttgtctgattttgtacttagttcaccaaaaaactagtttagttttaacatctacagaccctatgtttagggcatacctatgatgcagatcatgtaaaagttagatatatatcactattaaatccgcgggtgtaataaaaatgaagtttacaacattggcaggtttgtaatccaaagcccctaatagtgtttg

SEQ ID NO: 29815 - DNA, 245 bp, Glycine max
  Clone ID: TF_LIB3049-042-Q1-E1-G10
cacgcttcagggatgcagaaaaaatatgaaggaaaccgcaccagggtgttacaattgcggcaaacctgttcactggtcacgggattgccctttctccgctcccaattccaatcctaaccctaaccctaaccctaaccctaaccccgccaccactctcaatccaaatactcgaaatccttcgtcgtcctccttcaagcccaaaatccccggcgaaaagcccaagaaactcccccgaacaaagccta

SEQ ID NO: 29816 - DNA, 4143 bp, Glycine max
  Clone ID: TF_GmC988635_1
atggcgacgaacagccattttccggcgatttttccgatcctcgacggaagaaattacgatcagtggagtaggaagatgaaggcgatcctcggctatcaggatgtgtgggatctagtgcagaacggattaattccgttgccggagaacgcaaacgctgcgcaacaaacagtttacagagaatcgaagaaggaggattggaaaggtctatgcatcctccatcagtgtgtgaatcctgcaatttttgagaaaattgcgagatcggagacgagtaaagaagcgtgggatattcttgcgaattcctacgccggtgatcagaaattgaagaaggtgcgacttcaaaccctacgaagacaatatgaattgctagggatggaggagagtgaatcaattgctgcatatttcactagagttcaaacgatgacgaatcagatgctgtactgtggtgaaacgttgtctgatgaatcaatcgtggagaagattttgcgatcggtgtcatcgcgatttgatcacatcacggtggcgattgaacaggcgaaagatctgtcgacgatgacgatagaagaacttcaaggatctcttgaagcgcatgagcagagaatgaatgagaagaaaactgtgaagcctagtaccgagcaagcgctggcggcacaaacaggcaacaaatctggtggaaatcaaagaggacgtggtagaggtagaaacaattacagaggaggaagaggaagaggtaattacaataactcgaattctgctaaagtaaactctagtgaaaacagtagcaataataaacaaggaaataatcatactgaaaattatagaggaagaggaggtagaggttttagaggaagagggagaaaatttgataagagttatatacagtgttataactgtgggagatatggacattttgctgatgagtgctacagcaatgtcaatggaaatgatgctaaaatggctgaagaagaggaggagacagaggaaactctattaatggccattgaagaaaagaagagcagtgatgaaacagtgcaaatggtgtcaattaagaaggaaggtgagaatggtgagtactgggttctggacacaggttgttcaactcatatgacaggaaggagggagtggtttgttgaacttgatttcacaatcaagagtagagtaagatttgctgatgatagaaccatgaaggtggaaggtgtggggaaggtgatgataaggaaaaaagatggttcactgtgctacattactggtgttctttatgtgccaggaatgaagagtaacttgttgagtattggacagttactagagaagggatacagaatggtgcttgaagacaaggctatgaaggtgtatgatactgaacataatctgttgatgaagggaattctttctaataacagaatattcaagattgagttgggtatgttgttgcagcagtgtttagctacagcagttgacaaagaagaatggttatggcatttcagatatgggcacttgaattttggtgatctgaacaggatgcagagcaaagcaatagtgaaaggcctgcctcatatccatgttccaaaggatgtatgtgcagaatgcatggaaagtaagatgtcaagaggtgccttcaatccaaatgtgccaagtagatcaaaaagaaagctgcaggtgattttctcagatgtgtgtggcccaatacaacatgaaactcctgcaggtaacaagtattttgttacatttattgatgacttcaccaggaaactttggatttatttgattaagaggaagaatgaggtgttaggagtattcaaaaaattcaaagtactagtggaaaaacagagtggacagaatatagagattctgaggactgatggtggtggggagtatgttagcactgagtttgatgaatattgtgagaatgaaggaataacacatgaggttacacctccatatactcctcaacataatggagttgctgagaggaagaataggacattgcttaatatggtgagaagcatgttaaaaagtaagaacatgcctaagatgtggtggggagaggctgttaacactgctgcatatattataaatagaagtccaacaaagaaaatggagaatattacccctgaggaagcttggacaggtgttaaaccaaatgtatcacattttagagtatttgggtctgtttgttataggcatgtgcctgatcaacttagaacaaagctggatgataaaggagaagtgatgattatggtgggttatcattcaactggtggttacaaactagtgaatcctgtgaacaacaaaattgtgataagtagagacatagtatttgatgagggaaaagcgtggaagtggagtgaaaagagagagagttctactggtgtagaacaaaatctgtttgatgtgcctgctggtgaaactgagtcagacattgagggtgaaacagggccagttgaagataatgatgatgaaggtggtagtcctgagatgccaagaagatcattgagacaaaggcaggttcctgcaaggttaaatgactatgagataatgcctgatggtgcaattgatgatgaaggtaatttagtgcactttgcactacttgctgaaacagaaccagtaactttgcaggaagcaatgaaaaactctaagtggctagaagctatgaaagaggaactcagatccatagagaagaacttgacttgggaattggttgaattaccaaaaggaaagaaagcaataggtgtgaaatgggtgtataaagtgaaagttaatcctaaaggtgaagtggtgaagtacaaagcacggttagtagctagaggattcctccaaagacatggtgttgattatgaggaagtttttgcacctgttgcaaggattgaaactgtgagagttgtggtagctcatgctagtatgcagaggtggaaagtacatcaacttgatgtaaaatctgccttcttaaatggagaattggaagaggaagtttatgttgagcaaccagcaggttttgtgaaacaaggaagtgagaaaaaggtactgaaattgagaaaagccttgtatggcttgaaacaagctccacgagcttggaacaaaaagatagataagagtttaatcaacatggggtatgtgagatgtatttctgagcatggagtgtatgtgaagtcagggggtggtgatatagtaatactatgcctctatgttgatgatttgttggttactggaaacaatgaaactaaggtaactgaatttaaaaggaaaatgatgagtacttttgaaatgacagacctaggagagatatcctactttctaggaattgaatttcaaaatactagtgatggtgtgctactgtcacagaaaaagtatgtttctgatgtactgaagagattcaatatgcaacactgtaatggtgctgcaacaccagcagaagcaggattatggcttgataaaaatgttgatgagccagaagttgatgctactgagtttagacaggtggttggggcactgagatatctctgcaacaccagacctgatattgctttcagtgtaggtctgattagcagagttatggacagacctagaacatctcaccttgctgctgcaaaacgaattctaagatatgtcaaagacactatggcatatggaattcttctacctagtaaatgcagagaaaatgagaaaggtctctatggtttcactgatgcagattggggtggtgataaaactgatagaaagagcactgctggctctgtatttcttcttggatcaggtcccatttcctggagttcaaagaaggaatctgttgtggcattgtcctcatgtgaagctgagtatattgcagcttcaatgggaggttgtcaggccatctggttggataatttgatgcaggaactaatgataaaaaaggaaagtgttgtggagctatttgtggacaacaaatctgcaattagcttggccaaacatccagtagcacatggcagatccaaacacatagagactcgttatcatttcttgagagatcaagtcaccaaagggagattgaagctgagctattgcagaactgatatgcaggtagcagatatcttcaccaaggcagtgaagagagaaacttttaagaagctgaggaacattctgaatgttgttgactgtaatgaatttgtttag

SEQ ID NO: 29817 - DNA, 4029 bp, Glycine max
  Clone ID: TF_GM436D07rgnG8.C1.o10.ma
atggcgacgaacagccattttccggcgatttttccgatcctcgacggaagaaattacgatcagtggagtaggaagatgaaggcgatcctcggctatcaggatgtgtgggatctagtgcagaacggattaattccgttgccggagaacgcaaacgctgcgcaacaaacagtttacagagaatcgaagaaggaggattggaaaggtctatgcatcctccatcagtgtgtgaatcctgcaatttttgagaaaattgcgagatcggagacgagtaaagaagcgtgggatattcttgcgaattcctacgccggtgatcagaaattgaagaaggtgcgacttcaaaccctacgaagacaatatgaattgctagggatggaggagagtgaatcaattgctgcatatttcactagagttcaaacgatgacgaatcagatgctgtactgtggtgaaacgttgtctgatgaatcaatcgtggagaagattttgcgatcggtgtcatcgcgatttgatcacatcacggtggcgattgaacaggcgaaagatctgtcgacgatgacgatagaagaacttcaaggatctcttgaagcgcatgagcagagaatgaatgagaagaaaactgtgaagcctagtaccgagcaagcgctggcggcacaaacaggcaacaaatctggtggaaatcaaagaggacgtggtagaggtagaaacaattacagaggaggaagaggaagaggtaattacaataactcgaattctgctaaagtaaactctagtgaaaacagtagcaataataaacaaggaaataatcatactgaaaattatagaggaagaggaggtagaggttttagaggaagagggagaaaatttgataagagttatatacagtgttataactgtgggagatatggacattttgctgatgagtgctacagcaatgtcaatggaaatgatgctaaaatggctgaagaagaggaggagacagaggaaactctattaatggccattgaagaaaagaagagcagtgatgaaacagtgcaaatggtgtcaattaagaaggaaggtgagaatggtgagtactgggttctggacacaggttgttcaactcatatgacaggaaggagggagtggtttgttgaacttgatttcacaatcaagagtagagtaagatttgctgatgatagaaccatgaaggtggaaggtgtggggaaggtgatgataaggaaaaaagatggttcactgtgctacattactggtgttctttatgtgccaggaatgaagagtaacttgttgagtattggacagttactagagaagggatacagaatggtgcttgaagacaaggctatgaaggtgtatgatactgaacataatctgttgatgaagggaattctttctaataacagaatattcaagattgagttgggtatgttgttgcagcagtgtttagctacagcagttgacaaagaagaatggttatggcatttcagatatgggcacttgaattttggtgatctgaacaggatgcagagcaaagcaatagtgaaaggcctgcctcatatccatgttccaaaggatgtatgtgcagaatgcatggaaagtaagatgtcaagaggtgccttcaatccaaatgtgccaagtagatcaaaaagaaagctgcagaggaagaatgaggtgttaggagtattcaaaaaattcaaagtactagtggaaaaacagagtggacagaatatagagattctgaggactgatggtggtggggagtatgttagcactgagtttgatgaatattgtgagaatgaaggaataacacatgaggttacacctccatatactcctcaacataatggagttgctgagaggaagaataggacattgcttaatatggtgagaagcatgttaaaaagtaagaacatgcctaagatgtggtggggagaggctgttaacactgctgcatatattataaatagaagtccaacaaagaaaatggagaatattacccctgaggaagcttggacaggtgttaaaccaaatgtatcacattttagagtatttgggtctgtttgttataggcatgtgcctgatcaacttagaacaaagctggatgataaaggagaagtgatgattatggtgggttatcattcaactggtggttacaaactagtgaatcctgtgaacaacaaaattgtgataagtagagacatagtatttgatgagggaaaagcgtggaagtggagtgaaaagagagagagttctactggtgtagaacaaaatctgtttgatgtgcctgctggtgaaactgagtcagacattgagggtgaaacagggccagttgaagataatgatgatgaaggtggtagtcctgagatgccaagaagatcattgagacaaaggcaggttcctgcaaggttaaatgactatgagataatgcctgatggtgcaattgatgatgaaggtaatttagtgcactttgcactacttgctgaaacagaaccagtaactttgcaggaagcaatgaaaaactctaagtggctagaagctatgaaagaggaactcagatccatagagaagaacttgacttgggaattggttgaattaccaaaaggaaagaaagcaataggtgtgaaatgggtgtataaagtgaaagttaatcctaaaggtgaagtggtgaagtacaaagcacggttagtagctagaggattcctccaaagacatggtgttgattatgaggaagtttttgcacctgttgcaaggattgaaactgtgagagttgtggtagctcatgctagtatgcagaggtggaaagtacatcaacttgatgtaaaatctgccttcttaaatggagaattggaagaggaagtttatgttgagcaaccagcaggttttgtgaaacaaggaagtgagaaaaaggtactgaaattgagaaaagccttgtatggcttgaaacaagctccacgagcttggaacaaaaagatagataagagtttaatcaacatggggtatgtgagatgtatttctgagcatggagtgtatgtgaagtcagggggtggtgatatagtaatactatgcctctatgttgatgatttgttggttactggaaacaatgaaactaaggtaactgaatttaaaaggaaaatgatgagtacttttgaaatgacagacctaggagagatatcctactttctaggaattgaatttcaaaatactagtgatggtgtgctactgtcacagaaaaagtatgtttctgatgtactgaagagattcaatatgcaacactgtaatggtgctgcaacaccagcagaagcaggattatggcttgataaaaatgttgatgagccagaagttgatgctactgagtttagacaggtggttggggcactgagatatctctgcaacaccagacctgatattgctttcagtgtaggtctgattagcagagttatggacagacctagaacatctcaccttgctgctgcaaaacgaattctaagatatgtcaaagacactatggcatatggaattcttctacctagtaaatgcagagaaaatgagaaaggtctctatggtttcactgatgcagattggggtggtgataaaactgatagaaagagcactgctggctctgtatttcttcttggatcaggtcccatttcctggagttcaaagaaggaatctgttgtggcattgtcctcatgtgaagctgagtatattgcagcttcaatgggaggttgtcaggccatctggttggataatttgatgcaggaactaatgataaaaaaggaaagtgttgtggagctatttgtggacaacaaatctgcaattagcttggccaaacatccagtagcacatggcagatccaaacacatagagactcgttatcatttcttgagagatcaagtcaccaaagggagattgaagctgagctattgcagaactgatatgcaggtagcagatatcttcaccaaggcagtgaagagagaaacttttaagaagctgaggaacattctgaatgttgttgactgtaatgaatttgtttag

SEQ ID NO: 29818 - DNA, 719 bp, Glycine max
  Clone ID: TF_GmC121484_1
ctcgagccgaatcggctcgaggaagaaccctgcatttaagccacctgcggattataggccccccaagcttcagaagaagctttatataccgatgaaagaataccctggttacaatttcattgggcttattattggtcctcgaggtaacacccagaagcggatggagaaagaaactggtgctaaaattgtgattcgtggtaagggatcggtgaaagagggtaggcttcagcagaagagggatttgaaacctgacccttcggagaatgaagatttgcatgtgttagttgaggcagagacaccggagtcgcttgaggctgctgcgggtatggtggagaagctcttgcagcctgtggatgaggtattgaatgagcataagaggcaacagcttaaggagcttgctgcgttgaatgggacgatcagggatgaggagtattgcaggttgtgtggtgagcctggtcatcgccaatatgcgtgtcctactaggacatcaacgtttaagagtgaagttgtgtgtaagcattgtggggatggtggtcatccaagcatagattgtccggtgaagggtgctactgggaagaagatggatgatgagtatcataatttccttgcagagttaggaggttcggttcctgaatctgcaacaaagcaaaccagtacattggcagtgggggcaggcacttcttggaagcaatcctccttgggctaacaattttaatact

SEQ ID NO: 29819 - DNA, 942 bp, Glycine max
  Clone ID: TF_GmC79463_1
gaaaaaaacaggatttaaagaccatgactattaagcaactcatgggctccttacaagcatacgaagaaaaacaaaagagaaaaattaaacaaaaggaggctacggagcaactactacaactcaacgtaaaggaagcaaactatgcaaattacaagagccaaagaggacgaggtcgtgaccaagatcgtggacgtggacgaggacatggaggagaaggtagaggtggttatcaaaaaccactccaacaaattcaacaatggagaaagaagttggaatccacaagtaacaagaggtcgtggaagaggaaattcatggtcgaggtatgacaaatcacaaatcaagtgcttcaattgcaacaagattggtcactatgcatccgagtgtagattctcgaagaaggttgaagagaaagctaacttcgtagaagaaaaaggcggagaagaagaaacttcgctattcgcgtgccaaaacaaatttgaagagaaaagaaacaagtggtacctcgacaccggcgcaagcaaccacatgtgcggcgataaaagcatgttcgtggagatcaatgaagcggcaactggcgatgtctcatttggagatgactcaaagataccagtcaaaggcaaaggtaaaattctcatacgtttgaagaatgggagtcatcaattcatatccaatgtctactatgtgcctaacatgaagaataatattttgagcttgggacaattattagagaaaggctatgacatccatttgaaagaacacagtcttttcttaagagattgtagacataacttgattgctaaggtgcctatgtcaaagaatagaatgttcctcttgaacatttaaaatgatgtgacaaagtgtctcaaggcttgctataccgactcttcgtggctatggcatctatggttcgggcacctcaacgaagacggtctagagtcgacc

SEQ ID NO: 29820 - DNA, 3988 bp, Glycine max
  Clone ID: TF_GMCosmidSEREIS.C1.o2.np
cttttggaactgaatgaagaggacaattgttggatagacatgagaggcatgaagggagaagaaggagaggaaatgaggaagaaccaagaggaaaccgagatgaggaaggaagagtttccattccaccatttaggggtaaaagtgatcctgaagcctatattgagtgggagttgaaggtagaacaaattttctcttgtcacaccctaactgaaaagaggaagatcaagctagctaccttggactgactatgccttagtttggtgggatcaattccaaagggagagaaagaggtatatagagcctatgttggagacttgggagaagttgaaaagagtgttgagaaggaggtatgttccatctcactaccatagagagcttcttgataagctccaaagaatgacccaagggagtaagagtgtagatgagttctacaaagaccttaaatagccctgattcgagccaatgttgaggaggatagggaggcaaccatggcaaggtttcttaatgggatgaatggagatataagggatgtagtggagctgcaaaattatgtggagatagaggatatagtccatcatgctatgaaaatggagcagcaattaaagaaaaaaagtgtgaggaagagttcatctaattttgataactctaggtggagggaggggtttaagaaagagggaacttcatccaataggaccccaagggctgcaccacagcccacccaaaataggggcaaggaagtggccaacaattcttggtctagagacataaagtgctttaagtgtttaggtagaggacacatagcttctgaatgtcctactaagaaagttatgatattaaaagattatggggaaatcacaagtgagagttctcattctgaaccatcaagtgaagaaaagagtgcggaagaggaggagatccttgaataagacttgtttattgtgaggaggatgttaggagggatagccaaggagagtaaggaaagccaaagagaaaacatattccatactaggtgtcttatccaagggagggtgtgctctttgatcacagatggagggagttgcacaaatgtggctagtgctaggttggtgaagaaaatgaacttagagactaaaccccatcctagaccttataagctacaatggcttagtgaggaaggtggattgagggtggataagcaagtggagattcagttttctattgggaagtataaggaaaaaattctgtgtgatgtggttcctatggaagctagccatgtgcttcttgggagaccatggcagtttgatcaaaaagctcgccatgatggtcacaaaaataaatacattttttatcatgacaaccgcaaggttaccttggtttcattatgtccaaaagaggtttgtgatgatcagagtatcatgagagaaaaaaaagagtaagagagaaaagaaaatgaaaaagagaaaaaagaaaagaaagagagagacccacaagataaagaaaaagagaaaaaagaaaaaagaaaaagtggagaaaagaaagtgagaaagaatggattatttgtgaaaagtggagaggtgaggagctttaatggcaaggaagtctatgtatatactttataataaggagattgctacccttgattcagaccttgaacttcctagtggagttaaatctattttgcaggaatttcaggatatgttttcaaaggagatgccacaaggactcccaccattaagaggcattgaacaccaaattgatttggttctaggagctgtgttgcctaataggccaacatgcaggagtaatcctcaggagacctaagagatccaaaagtaagtcactgatttgatgactaaaggttgggtagaggaaagcttgagcccatgtattgttcctatcatattggtgccgaagaaggatgaaagctggaggatgtgctcaaattgtagagctgtcaacaacatcaccattaagtacatgcatcccattcccaggttagatgatcttcttgatgaattgtatggatcatgttatttctctaagatagatttgaaaagtggatataatcagattaggattagagaaggtgatgaatggaaaacagcttttaaaaccaagtatggcttatatgagtggaaggtaatgccatttggtctaacaaatgcccctagtactttcatgaggttaatgaaccatgttttgagagagttcttaggaaaatttgtggttgtgtactttgatgacattcttgtgtatagaaaaaacttggatgaacatttgcaacatttaaaatctattttgcatgtgcttcgaaaacaaaggttgtatgcaaatttggaaaagtgcacgttttgtaaagatcatgttgtgttcttaggatttgtggttaactctagtagagtgcatgtagataaagagaaaataaaagcaatccaagagtggccaattcctaagaatgtgagtgaagtgagaagtttccatggcttagctagtttctataggaggtttgtgaaggacattagtactattgttgcacctcttaatgaactagttatgaaacatgcaagatttaaatggggagaggaacaagagaaaacattttttgtcctgaaagagaaattaacaaatgcacccatacttgctttgcctaactttgctaaatcctttgaacttgaatgcgatgcatctgaggtggttgctgatgctttgtcacgcagttatgctttactatatactcttgaagctaagtttctaggttttgagtgcattaaggaattatatgaacatgatgctgatttttcacatatttaccaaacatgttatcctattgcatttgatgggtattttaaacatgatggttatttggttaaggataagagactttgtgtgcctaagagttccatcaaggaagttcttattaaagaggctcatgaagggggggttaatggggcattttggagttcaaaagatatatgatatcttgcatgagcatttttactggcctcacatgaaatctgatgtgcattcattatgtaataagtgtcttgttagcaaaaaggctaaatctaaagtcaagccacatggtttgtatacttcattacctattcctgaacatccttggattgatatttctatggactttgtttttggtttgcctcggtccaagggaggaaaggactcaatttttgtggtggttgataggttttctaagatggctcattttatatcctgcaagaaggtggatgatgcttgccatgttgttgatttatttttcaaggaagtagtaagattgcatgggttgcctcggagtattgtaagtgaccgtgactctaaatttcttaaccatttttggaggactttgtgggggaaaataggtactaagctattgttttcaactacatgtcatcctcaaacttatgggaaaaccgaggtggtcaacataaatctttctactcttcttagggctgttattaagaaaaatattaagacttgggaagagtgtttaccacatgtggaatttgcttgtaatagggttgtgcatagtactactcaattgtcaccttttgaaattgtttatggttttaaccctttaactcctttggatttgttgcctttacctgacatttcataatttaaagataagtttgggtaggtcaaagccgaatatgtcaagaagatgcatgagaaagtcaagtcccaaattgagaagaaaatggaagggtatgcaaaatatgcaaacaaaggaaggaaaaaggtaacatttgaacgaagtgattgggtttgggtacatttcaggaaagagtggttcccttcccaaaggaagtccaagctcatgccaagaggagatggtccatttcaagtactggccaggatcaatgataatgcctacaaaattgatttgccaagagaatatggggtaagtgctacttttaatgtagttgatctcactcttttcgatgcaggtgatgacttcagagatttgagggcaaatgcttgtcaagaaggaggg

SEQ ID NO: 29821 - DNA, 1163 bp, Glycine max
  Clone ID: TF_GmC9855_12
tacggctgcgagaagacgacagaagggcgtaattcgaaatctgtaatgcatgctgggaatacagtgcaggagaagctgatagtaaagcattttgctagtatttcttcttcgaatactcaagaagcgacgtcaactggagttaacccacaattatcaccatcttcaactatgttcttctgaaaagatgtctcgcgtgtatgttggtaacttggattcacgagtcactgagagagatctcgaagacgaattccgcgttttcggagttattcggagtgtttgggttgcacgtagaccacctggttatgcttttattgactttgatgaccgcagagacgcacaggatgctatccgtgaattggatggcaagaatggttggagggttgagctttctcacaactctagaggtggaggtggtggtcgtggtggtcgctctggtggttctgatttgaaatgttacgagtgtggtgaacctggtcattttgctcgtgaataccgcatgcgtggtggttcaggaagacgccgtagccgtagtggaaggagattccgtagtagcccaagttatgggcgaaggagttacagtcctcggtgggcggtcccctgatcaccgtagtaaatcatctcgtggacgtagctacagcaggtctcctcctgaatcccgcatgcgtggtggtccagaagcacacggaagtgtgtagtccgcccagattcggtaggagcccaagttatggtcgaagtccttgtgggcggtcccctaggcaccgcagtttgtcacctcgtggatgtagctacagcaggtctcctccttattgtgggcgtgaggaggttccttatgctaatggaaatggccttagggaactacgcagaagcagaagttgattttgagagtttggtattgggtatctgtgattgttaagagaatagtgagattttgttaatttagtggtgctttgactgaagtatgagtctgttttgttgggcaaggccctgagtttctactcttggattggaatagttagtttattttatgtctcagcttgtgttgaatttatctttgcttgtagtttcattgcaggtaatgatcttgttaaggttgttgttactagtttgttaaatatagttccagatctttttgcaataaaaaaaagtgctttccttctctgttg

SEQ ID NO: 29822 - DNA, 1917 bp, Glycine max
  Clone ID: TF_GM310N10.C12.o2.np
gtattgacaatcaaaatttctattccttggattatggggttgaactaagcacatgtttttaaggaaaggttcatcaagtcaaggtcaagtatggaagaagaaagaagaaaaataatgaaagaaatgaaaagagaaaaacatgcctcctatagtagtcataactcttgcaagagcctaagtgaagaacttcgtgactattatgaaggaaggcataggtcacatcttaattgggaaaagaaggttgaacaactctttgcttgccatcatattagcgaagagagaaaagttccattggctacccttagctttcaagggtatgccctctattggtggacttcccttgttaggaaacaaaggattcatggggatcctccagtagagtattggaatgatcttaagagtgcccttaggaagagacacattccctcctactataaaagtgagcttatggacaagctccaaaggcttagacaagggagtatgagtgttgaagaatatagacaacaaatggaactactccttttaagatctagacttagggaggaggaaagaacaagcatagctaggttccttagtgggcttaatatgtaagtgagggataaggttgaactccttccatatagggacctagatgagctagtccaactttgtataagagtggagcaacaacttaaaagaaagccttcttcaaaatcttatggctttcactcttatccaaggaaggactaagcccaacaaattttgggggctgcatcttcaaaacccaaggaagataagggtaagaccatagagaaatccacccctacaactagttcccaagaaaggactagcaacattaaatgcttcaaatgtcttgggaaaggccacattgcctctcaatgccccacaaagaaaacaatgatcatgaggggtcaagacatttatagtagtcaagaggagaaagagtctagtgaggaagtctacccccatgaagaaggtgacctcttaatggttaaaaggctccttggaggtcaatcttgtgatctatctcaatcccaaagagataacatctttcatacaagatgcaaaattttagataaaacttgttctcacattgtggaaagtggatcttgctgcaattgttgtagcacaagattagtttccaaattgaacctcagaatcatttcccacccaaaaccttataaacttcaatggctcaatgagcaaggggaaatgatagttaaccaacaagtgaaggtacctttctccattgggacatataaggatgaagttaattgtgatatagttcccatggaggcaggacatattcttttaggaagactgtggaaatttgataggaagatcatttacgatgacctaactaatgagattacctcacccatcttggcactaaatttgtgttgcatcctcaaacaccttcataggtggccagagatcaactaactatgaaagataagagggatgaggaagaaaaactagaaaaacaaataaaagagttgttggatgagggtttggttcgtaagagcttaaatccttgtgctttgttggtatgttttattccattactttccttaactttttaaatagtgatcaaggccttcccatggatcctaagagaataaaggtcattcttgagtggcctactccaccaagtataagggaaatttggggcttcaatgacttaacaaacttttacaaaaaggtttatcccatatttttctatacttgtagcaccactcattgagttggtgaggaactatgttggatgggttggtgacctggcagcgatcgacgcttttctcgcctatcataaccacaaggaaagcccggttgtcgctatgatagccgacctatatgacaccttcgaccgaagatgtgagaagagcagtacgaggatttccctcatcctttcacaaa

SEQ ID NO: 29823 - DNA, 460 bp, Glycine max
  Clone ID: TF_LIB3242-716-P1-K1-G2
ctttagaaactcttagggctccacctttagcttgatatgtacaacgattagagtctaaagtgcttatagatattaagttcttcttgagtgcggggaacattaccttacatgtgttaatgttcttacaataccatcattcatcttgatcttgaccgtacctttgccagctatactacaagcaccatcattccccatcagaactttgccaccatcaacattttggaatgtggcaaaccagtctctgttaggcgtcatgtggaaagtacatgctgaatcaagaatccagtcatcatcattaacatttgatgagacatatagaacattttcaccgtgtgatttttcggagacaacagctactccaccaaactctgaagtactcactttatctttcttgagctccgggcagttcctttttcaatgcccttccttctgacagttatgacatttgttgttgttctta

SEQ ID NO: 29824 - DNA, 1686 bp, Glycine max
  unsure (1)..(1686): unsure at all n locations
  Clone ID: TF_GmC88487_1
ggcagtttcgtcctttcgatccaattctgtgccctagcaatccaacacgcgcgagtgagtcagtgttattataacggctgcaagaaaagaaccgggccggcgcagtagaaactcgaaaggaatcagtgtttgtgtgtttcgcatattcttctccgttttagatttgagagagaagaagaaagagaaaattggataagatagttttcgttttcggcgaagaattgaaatctgagtgaacgatgggagtcccagcgttctaccgatggctggcggagaagtatccgatggtgattgtggacgcgatcgaagaggaagcggtcgtaatcgacggcgttcaaatccccgtcgatacgagcaacaagaaccctaacaacatcgaatacgataacctctatctcgacatgaatggcatcattcatccttgctttcaccccgaggataggccgtctccgacgtcgtttgatgaggtgtttgagtgcatgttcgactacattgacagactattcgtcatggtgcggccgngggagctgctctatatggctattgacggtgttgcgccgagggcgaaaatgaaccagcaacggtctaggcggtttagggctgcgaaagatgcagctgatgcggctgctgaagaagcaaggttaagggaggaatttgagaaggagggaagaaaacttccttctaaaggagagtcacagacttttgattcaaatgtcattacacctggaactgaatttatggctgttttatcaattgcacttcagtactatgttcatcttaggttgaacaatgaccctggttggcaaaatattaaggttattctttctgatgcaaatgttcctggtgaaggggagcataagattatgtcctatatccgcctgcagagaaatcttaaaggttatgatccaaatacacgacattgcctatatggtttggatgccgatctgattatgttggcattggctacccatgaaattcatttttcaattcttagagagattgtatttactcctggacaagacaagtgcttcctctgtggtcagatgggtcatatggctgcaaactgtgaaggaaaggcaaaaaggaaggcaggagagtttgatgaaaaaggagaggctattgtgacgaaaaagcccttccagttcctaaatatttggactctgagagaatatctggagtatgagatgagaatatctaatcctccttccgagattgattttgattgcattgtggatgattttatcttcatgtgtttttttgtcggcaatgattttctaccacatatgcctacactagagattcgtgagggtgcaattaacttgctgatagcagtatacaagaaggaatttagggaatttggtggttatttaaccaatggaagcacgataaacttgagcagggtggagcacttcattcaggctgttggatcttatgaagataaaatattccagaaaagagctcgattgcatcagcgacaaacagaaagaataaagcgtgaaaaggcacaggcaaggaggggagatgatgctgagcctcaatttcaaccagagtctttagtcgcagtttcacgattccatggttctcgtcttgcttcagctccaactcctcaccatttcaaccttctgggcattataattctcaagcgtctgcatcagttagaaaagacaataaagaaccatttgagag

SEQ ID NO: 29825 - DNA, 858 bp, Glycine max
  Clone ID: TF_GmC419_67
gctccttctaatcccatcccatgtgcttttacttttaatccttttttcaagaaaaagagagcttgttttgtttgtgggaagccaggacattttgctcctcagtgtaggtatagagttatcagaaatggcaatcctcctaaatgatgcaatcctaccccccaagggcattggatagaagactccaagaaaattgggccaaagatgcaagagaaggccctagggttctcatgagtcttagggtagattttgggcccatggatcaaaggttggatccacttcttctttgtaagtattagaatagattttttcttcttttgggtcttgtattttggtcattctagtagtatagggttttaaccttgtattttagggcattttgagtagtctttgtagtagggactttttttttttgtattttcatgtatttttggaatgggggtaagcttagctattatagggggtgtgtagctaagctctaacttctcatctcaaggaggtgagcttagctattagagaggtgtgtgtagttaagctctagcttctttaggaatattctcaaggaggtgtgtgtagttaagctctagcttctttaggaatattctcaaggaggtgagcttagttattagaggggtgtatgtagctaagctctagcttctcaagaaagttttctcaaagaagcttctcaaggaagttttcttaagaaagcttctcaaggaagttacctagtctataaatagaagcatgtgtaagtacttgtggtaactttgaatgaatgagagttcttgtgagacacaactcaaagttcaacttctctcccttttttttccttcaatttcgtgctcccccccggacgcgtgg

SEQ ID NO: 29826 - DNA, 471 bp, Glycine max
  Clone ID: TF_LIB3242-180-Q1-J1-B10
acggctgcgagaaacgacagaaggggatgacaaacattgcagcaaaacttaagaccttgggaatggttgtgaatgagaacttccatgttgagtgtatgctgaaatcattactgtccgagtaaggctcgttccaaatgagttataacaccataaaagataaatggaatgtgcatgaattacacagtatgttagtgcaggaagaaatgaggcttaagaatcaaggaagtcacttagtccattatgtaagccaccaagggaatcaaggagctagaaaaaaatttgtgaagaagcatgataaaggcaaagggccattaaagattaataacaactctaagcaaatccagaagaagacatcaaagagaaataattgccatttttgtgggaaatctggacacttccaaaaggattgcccaaagcgtaagtcttggttcgaaaagaaagggattcctaacaatccaaaccataagccca

SEQ ID NO: 29827 - DNA, 506 bp, Glycine max
  Clone ID: TF_GmC115882_1
tgcctgcgggtcgactctagaatgggaactagtcctacgcaatgtcttggatgactgagaatttgaaagaaagtgagatgcagagtaatcagatagcaaagaggatgagactgaccgcttggatatctttgcattagattgtttaggcaattctatgtcatttctgcttcgtttctttcctacatattccttttttttatgcctatcagtttcccttgctcccgggaatgattcatttctccatggtgcatggtgatgtcgtgaaccagacaacctcctcccatctctctggtgcctcagtgacaacggctccaaatttgactgcagctttgccaaggaatcagattcaaatttattcacatcttcacttttatgcttcttgtctattctattattctgccaaacatccaacctgttatatttcctctgtgaagtatgttcttttggacaatttcgaattttatgaccaggatcaccacatttaagacaaatttgctggaaatttt

SEQ ID NO: 29828 - DNA, 608 bp, Glycine max
  Clone ID: TF_GM433K20.C15.o1.fg
atgacatctgtgaagtatgaggttggaaaattcacaggccaaaatgatttcggcttatggcgatcgaagataagagcattgcttgttcatcagggtcttgaagaagctttacaaggtgaaatcactcttgatgcaaagttggatgaaagggataagaagatcttgatggataaggctcacaatgcaatcatcttgagtcttaaagacaaggtactacgacaagtctcgaaggagaagacaacaactgaaatttggttgaaactagaaggtttatacatgaccaaatctctgaaagacaaccattttgagaaaaagaaatcaaagccgcagtctggaaatagtgaaaatgtacctaatataagatgttaccactgcaaaaaggaaggtcacactcgaagattctgtcctgtaaggcagaatggttgtaattctcatacatcaaatgaaagaggaaatgcaacgatagtccaagatggttatgaatctacagaagctttagtggtaggctctgggaaatctgatggagaatggattatggattctaggtgttttttccatatgacaccaaataagccttggtttgagaagttcactcagctacacggaag

SEQ ID NO: 29829 - DNA, 1345 bp, Glycine max
  Clone ID: TF_GmC419_136
gcaacaacttaaaataaagccttcttcaaaatcttatggctctcactcttatccaaggaaggaccaagcccatggaattttgggggctgcaccttcaaaacccaaggaagataagggtaagaccatagataaatacacccctaagactagttcccaagaaaggactagcaatattgaatgcttcaaatgtcttaggtgaggtcacattgcctctcaatgccccataaagaaaaccatgatcatgaggggtcaagacatttatagtagtcaagaggagactacttcttgctcttcctctagtggaagtgaagatgaagtaaggggtcaagagtctagtgaggaagtctacccccatgaagaaggtgacatcttaatggttagaaggctccttggaggtcaatcttgtgatctatctcaatcccaaagagagaacatctttcatacaagatgcaaaattttagataaaacttgttctctcattgtggaaagaggatcttgttgcaattgttgtagcacaagattagtttccaagttgaacctcactatcattccccacccaaaaccttataaacttcaatggctcaatgagcaagggaaaaggatagttaaccaacaagtgaaggtacctttctccattgggacatataaggatgaagttaattatgatatagttcccatggaggcaggacatattcttttaggaaggccgtggcaatttgataggaaaatcatttataatggcctaactaacgagattaccctcacccatcttggcactaaatttgtgttgcatcctcaaacaccttcacaggtggccaaagatcaactaactatgaaagataagagggatgaggaagaaaaatttgaaaaacaaaagaaaaagaaggatagtaaggccttgtcttcaaaggccagggggaaggaaaaagagggaaaggattcctccaagaagattgttaagaaggaaaatcattttgcaacaaaaggtgatattaaaagagcactgcttcttaaacaatcttcctaccttctcctatcaagggaaacatcccttagcaataccacaattcctacacttgagacgttacccccaaaggtccaagaactcttacatgaatttggtgatatatttcccaaagggatatcccctgggctacctcctttaaggggaatagaacaccaaatagatttagtcccaggagcaagccttcctaataggccaacctataggactaaccctcaggagactaaggagatagagtctcaggttaaagaattgttggagaagggttgggtccaagagagcctaagcccatgtgctgtgctagctgttgttggtgcctaa

SEQ ID NO: 29830 - DNA, 476 bp, Glycine max
  Clone ID: TF_GmC122596_1
ctcacatctagagctagttctgccttactagtggatgcatcagccatcagacataggttggcttcttcctcactgtccttgtcagataaggaatcgttcagctactctcaagtgctcatgaggcttttctttttggaattgaagaatttcttcttcttatccattggcttttcaaggtcagtacattctgacttgaagtgccctcgtttcgtgcacttatagcagatgattggacttttctctttcttgtgcaaggatcttttgtatgatctattgaacctagaggagttcttatttttccaattttttttatctttctggtgatcagacttagctcattatcttctttattagagtcatcatcgttagattctttttctgaagcatacttaacaacaaaggccttggatgatgtctctttgaacacaaagttgcgttttggtctttgatctacaagggatagcaatttccctttc

SEQ ID NO: 29831 - DNA, 566 bp, Glycine max
  Clone ID: TF_GmC109188_1
ggtgggaggtcttggattgttgttggtttggctgaagtattttctaatcttctaagaatgttactaacatcaaatttgttattggtaataaaatccttttgtttaggttttacttccaatgttttcttgagcttttctagaaaatttttcttttcctgggggtcaggtatagaattaattgcttcaaacatgaggtcttgttctcttgttaaagtattgatttttctttcatcctctgtagatgacaattgatcatcttgttgaattagattgagattttcatcagagatcatggaggatgaagtttttgtttcttcttcctccgaactttctatgagcaaattattaatttgctcttcaatggctggttctaaattaagatttcttaattttctttttaacctataatatttgctaatgtgaccttgttttccacagttatagcatgttactttagattttagtttttggtttggggtttctatttctttactaattgaaggcttgtgccagtatctccttcctggaaatatctttttggtaaccaccttattttatggcctttt

SEQ ID NO: 29832 - DNA, 2265 bp, Glycine max
  Clone ID: TF_GmC147665_1
gaccgcctaccttaaaaataatgataaaaaaaatcgtaaataaagttcatacatcattactcaggcaatccattctatattccgagggactgcgaccaaattgtctcaactattatcatcaactgaattcaaaaatttgggggccaattcccgtgttgaacttactactccactatcttaattctaacttctgcaaggagtaaactgaggcattatcccaactagtccccacgtaaaaaagaaatacaaaatggattcaaaaacccaacaaggtctgaaataatattaccgtttatgttacataagagaacttgaaataaaaaaaaaaaaaaaattgggcaccatgctaccagacatgatataaaatcatcaaaacttaggccgctaaggaaccgagatccagaactatatacatgagcacgagtacttgtgtaaattgacttggagtgatccgaaagaccatccctgctcacatattaaacctcggcaagagctctcttcgagcttccactgctgttctattgatagccccattgactgcaagcacctttggatcaattccatgaccattttgaggacagttatagctgaagtgtccatgtccataacagagtaagcacttagcaaaccttcctccccctgcttgagacacatcgcattttccaagggaatgtccaatttccccacaaaagaagcaaacttcctcatccatggaaagacatttcagccgctggcattgttggaatctatgaccaggctgtcggcatgcccggcatctcaaggaactttcaccatgatgtttaaagggggatttagtcactctgagagtgtcagtaatctgaaccagggttttaccagctggctcaacattgcatctgcccatagaattttcagttgtggatccttcagttttttgaactggggtttctgcaattcgatcagcattgtgtttctcagattctaacccttcattttttgcactgttccttttcttcttcctctttttcttggtcatcggttcagggtctactggggttgctgggtctactggaggagtttggcttgctggaattgttgggtctattgagggttctgctataggatgtatagatctttgaactggggttccaggtggcttgtcatcatgttcatcaggttctgctcctttgcttataagggcacttctctttctcattttcttcctcatcttctgaccttgatctattgggggagctgggactgggattgttgggtctattgaggttgttactgtaggatatgcaaatttttgaactagggtttcaggtggcttgacaccgtgttcattggtttctgtcccttcaattatgatcacaatcctctttttcttcttcctctttttcttggtcatctgctgaccttggtctattggggtttctgtgtcaacagggggagatgggcccactgggtcgattgagggtgcatctgtatggtatatagatttctgaacaggggcctcaggcggagcagcttcaggcagcttgtagtgttcattgagttctgccgcttcactttcaagcttactcttccttttcttctttttctttgacatctcctgttcagggcctgttgagattgcaaggcaagggtccattggaattgctgggtctattggggatgcttctataaggcatgtagatgtctgaattgagatttctggcagctctgtagaagttgtcttcttcctttgcttcttctttatcttcttcatcgtcagttctaggtctattggggttgctggatccaccaggattgtttggtccatcaaggatgctggttgtaggcttattggggttgcttggtcttgttggacctggtctggggcctggttgagggttatgtccatatgcaatgggctcccttggttctccacctcttctgagcatattattattggttctttttctctcttgcttttttggtttcttcttctctgatcaattggagttgctggatcacccggaggctctgcacatggcgcagagcaaggttgaggttgagggggttgagcacgtgcatcagggttttggacaggttctacctcttttttcttttctgagtttgttggagctggcaggtctattggggatgctaatttaggtttagaacatgcctgatcctcaaccttagcttcagttggttctgcccttttgttcacttgtgaattattagggattgctatgtcagatgggagtgccaatttaggtttagggcacactgcagagt

SEQ ID NO: 29833 - DNA, 541 bp, Glycine max
  Clone ID: TF_jC-gmX3043001A11sg10F7a1
taatatccgcggtgtaccatgtgaacttatttacagtatttcattataggaacttatatcatcaagcatgtaaagattatcaatgaaagaaccataaccaaccatgtttgaattttggtagagactaactttattatttccaaatgaacaagaaaattcaaatttgtccaaactagaaatagaaataaaattccatctaaaagacggtacaacaaaagtctcaaataaatccaaataaaatcaagtttttaactgtaatctaaaagttctaatagcttccactgcaacctttttgccatcacccacaaagatgaatctttaatcatcacttggcagtcgactccacaggcaaccctttcttcacacgccatgcggcatacttggaacactctttcttcatgtgtcccaacttcttgcagaagtaacaggtaaattcctcatccttattttgcttcttttgctgagaagtcccttccgcagcacccttagtcttctttcttttcttattctgagaggtcgaaagtaagtgagctttttcagt

SEQ ID NO: 29834 - DNA, 580 bp, Glycine max
  Clone ID: TF_LIB4203-002-R1-K1-B10
cggtaaggagtgggaaatacccaagtaccagcaagtgcttcagcccattgttcctctagaagggcaagagatgcaagtgaaggcaaaaaggccaaagcctcactgtgtcaactgtggttctgaagagcatcagatgaaggaatgcccaatgcctcggaatgctgctcggatcactgagaagaggaaagagtacatggatgcctgtggcgaggccagcggccaaagcttccagcagcgctatcatgccgaagaagtagaagagagatttggaagattcaagccatgagttattagtgaggaacttcaagatgcactgggtgtgacagacaagagtgttgcccctttgatctaccgaatgcgccaggtaagctacccaccgggctgggtgaagggggctgaactggagaatggtgggctggggctgtgtgggtggagacggtgacgctggtggggaaacgggggctgggggaaatgcggggtgggggtggggcctgcggtggggtgggggtggggggggctgtggggggggggggtggggtgggctgggggggggggttggggcgtggaggggggggtgggg

SEQ ID NO: 29835 - DNA, 828 bp, Glycine max
  unsure (1)..(828): unsure at all n locations
  Clone ID: TF_GmC147156_1
acgcaagagtacaaatgcaatgaaatgcattagatttcatgcaacaaaatttataagttgcgcatataaaacataacccagtggtgttcaaagaaaaatttgggcatatctaaagcaccagtacaaatgtaatggaagtcatcaaatctcatggtacaaagtttaaaagttgcagatataatacataacctagtagtgttcagagaaaattggtacacaaaggatgcctttcaaatttcccctctgtaacctccagatccaaaataatcctttctattatttgctatcgccatgctcttctgatgttctaatttgggacaatcacggatacgatgaccaagcccaccacaatatgcacatcctttgaccccacttatgtctgtgatctcttcattatcttccattggatcattcaactcagccaaaactgggggaatcctttgctttgcttcttgcaagaggtgtttcaagtcaagtaatgttgtctcactttgattcttgtttataaatgttgtcgctataccagtctttccacatcgtccagtccttccaatcctatggacataattttcaatttcagctggcatatcatagttaatgacatgctgaatatcaggaaaatccaaacctttggatgcaacatcagttgctaccaacacatctttctttccagccttaaaagcagcaatggcatactctctctcttcctgatccttgcctccatggatggccactgcttccactcctttcaagagaaggtattcatggatgtcatcaacgtcagccttattctcacaaaatatcacggacgcaggtggggttttttcn

SEQ ID NO: 29836 - DNA, 928 bp, Glycine max
  Clone ID: TF_GmC80348_2
ctattatatattcttcagatgaaatctcggcaccagcttgtgaggtgttggaccaccattccatgatttcttcctcaagaaaatcatgattggatatatactgactttcgaccatacacttgatactccccactttcactgagagagattttcttgtattctgctctgaacactgtctctgggactgggtctttcaagatgtcggtgcgggacaattgaagcttttttactgcttcaaatatttcctttggcacctgtgaaatctgcctttcagccaatttggatggagataatgtaggattttctctgaatttgttttcctctgaactcaaaccacggtatttcttgaatgatgcattgcaccctaccttatgggttataatttcatttgatttccacttcaaattaatattttgacctgctcgttgatctgtttcatcattaatagaaccgccagataaaactcggtcatcctcatcagtcaacagcctggcactctcttcattgcttgggattaaatgtttttgttttccacaatcattgaccaaggcattagctttcagttcatgtttcctagttgagattgaagtgggacatgaaattgcccaatggttgggctgaaagcatttgatgcatagacaagaatgttcttccagtcctccatatgaatctatattcttctggagatcttctagcttgttttctgcaatagccgagcaatcagagagttgatgtccttttgttccacaaaacaagcacaacatatttacctgtgtggtagtatctgttgcatttgttggtatgatatgtttgatggcactaaatctccttgcaaacattgaagccattggctctaaatttctgagccctggggaagatgaaaggggtttgaacatatacattgatttatgatcattatttcccttat

SEQ ID NO: 29837 - DNA, 1203 bp, Glycine max
  Clone ID: TF_GmC261618_1
ccacgcgtccgctgttactctcctatataagggagttagttagaaggttgaaatacgacgagagtgctaaatctatacactctaatttcattgttctgatctttaataagaacgatacttctttacttgtgtgttacgattatctattttctttttccctaatctgaattcgtctttcttagtcttaaactcaacaaattagtatctaaagctttagttcaaataatttcacatcgattttgtggtgggtcttaatcatcagagatcaaccattatattttttttccatgcttagtcttcaagatttgatcaagaagatggttaacataatcaagattgagaaattcacaaggaagaacaacttcaacctttagcgcatgaagatgtgtgccttgttgaaagaacaagggatctgggcacctctctctggccaatagacaaagattgataagtccattcttgagcaacaagaagaaaaaatgcattcgctaattcttttgtcattgtttgatgaagttctttacaaagtttctaaggagaaaattgcttttgtgttatggctcaagttgtagaaactcttcatgacaaaatcaatctgcaacaagttgctactgaaacaacatttgtttggcctctattagaaggaaggcaaacctctggaagaccatctcgatgagttgaactctgttttgttttagctctgtgacattgatgtcaagttagaagatgaagatcttgcaatgattctattagcctttcccccaattcatatgagaattttgtgaattctcatagtgttggaaaagattgcatcacacttgaggaagtcaagtttagtctctattcaagagagcttcatcacatagcttttggaaaatggtgatgaagcctctacctttggattatcagtaaccaatactacaaaagggtagaaaaagaagaaaggcaaaggattcaagaaagggaaagttaatccaaatgatatctataataattgcaaaaaacctggtcattggaagaaagattgtcccaagaaaatcaagaaagattatattacagttgttgttcgaagtgattcctcatcagaagatgatttggtactctcaagtgttaatcaacaataacatcactctaaacaatgggtgttggactcgggttgttcttatcatatgagtccacaccgaatctggtccatgacctatg

SEQ ID NO: 29838 - DNA, 2265 bp, Glycine max
  Clone ID: TF_GmC9855_2
gaagcgcgaactcggctcgaggtggctctgtagatttagatggatattttactgtatactatcctttcaatttaaccctttctttctccgctccgaacgcggaaagtcccttccttttcaatttccccaatcttttgaaatcattcttcgaaccctaaaaacatctttcaccgattttcattttccctttgcaaattcaccgattaaatgtaattaatttgcgacgatgccttagccaatatggcgtgtgaaatgtaacatgctaatattgttattttttttagcaagttcctagcagcttatgctatctgatgctttcctgggagtctcccttcctaaaattgttcttgtgtaattttttgttttttggcttaggtctagtctatttaaaaaaatatccagaaaaaaaatataactatttatttttattaaaaaatctttttgagtttaaacactcttaaaaaaacaaataaaatttaaacaaatgtgcgtgacagatatcaattttcccatattattcacagaaaggaaaaaagggccctataaaactaaacgctccccttctcgaagaggccgctcgctctgtttcttttttgttctcaatgcaccgcatgagtttcttcagagagctcgtcttctagggtttttctttctctcttctcactgcatcgcttcaggttcttctgaaaagatgtctcgcgtgtatgttggtaacttggattcacgagtcaccgagagagatctcgaagacgaattccgcgttttcggagttattcggagtgtttgggttgcacgtagaccacctggttatgcttttattgactttgatgaccgcagagatgcacaggatgctatccgtgaattggatggcaagaatggttggagggttgagctttctcacaactctagaggtggaggtggtggtcgtggttggtcgctctgggtggttctgatttgaaatgttacgagtgtggtgaacctggtcattttgctcggtgaatgccgcatgcgtggtggttctatcaggagccgtagccgtagtccgcccagattccgtaggagcccaagttatgggcgaaggagttacagtcctcgtgggcggtcccctaggcaccgcagtttgtcacctcgtggacgtagctacagcaggtctcctccttatcgtgggcgtgaggaggttccttatgctaatggaaatggccttagggaacgacgcagaagcagaagttgattttgagagtttggtattgggtatctgtgattgttaagagaatagtgagattttgttaatttagtggtgctttgactgaagtatgagtctgttttgttgggcaaggccctgagtttctactcttggattggaatagttagtttattttatgtctcagcttgtgttgaatttatctttgcttgtagtttcattgcaggtaatgatcttgttaaggttgttgttactagtttgttaaatatagttccagatctttctgcactacattaatatgcttcacaatcctagttacaatgataaacttgaagtaatgcaaaacgacattagttttagggcagtcttggataaattaaaggtagatagcaaaaatggttggaagcttaataatcctaaagttaataagcgctgaggtcgtagtgggcttgctccagaagaagtcatttcattgattatggccaatcctggggttgctatggcatttcaaaatcctagagttcaagcagctatcttggaatgaccacataccccaacgataaggaggtaatggatgtcttcaacaaaagatcagaacgcttccctggagtagtttgacctcgacgcagtagtgtgttgttgttgtttcctgggtgtagttatgcatccttttcctgatgacctaggaccttattagctccggcctatccacacggaaccatgcaaaactctcgtgtgctcatatactgcaggctcgcagttacggctccggatagtaactgtcttccctgggctaaaataatgccaaagttggatgtttcgtttccctaaagatagattagtgtctctgttgggatgttttgtgttttcattaaagattttgtttggggcattgttgttgcaggttggcttttgagttttcgggtggccctaaaaatgtgaatgctgcacataagtggagtattgcggtgcattaaacttgtcatggctgcgtccaattaggtcgcaacggtcaaatagtcatagtgaaccgtgtaatcaaagggatattcgttgtagtagtt

SEQ ID NO: 29839 - DNA, 272 bp, Glycine max
  Clone ID: TF_GmC127329_1
cggctcgagtacggctgcgagaagacgacagaagggcccctttttgtctacagttgaaataggtcgtgcctttatcagcacaatttgagatgtgccctggcttaccacacttgtaacaagtgatctaagttaagaaagtagtgggtttgctaccattaccaccagcaaactccatagcaatagtcctttgattgttggggtgattaccaaattgcttacttttggttgagtacggtttcccccgatgttgaggtctattattgtttttttta

SEQ ID NO: 29840 - DNA, 1233 bp, Glycine max
  Clone ID: TF_GmC174_6
gtttcgggagaaaaagcaatccactcagaggacccttttaattgttcaccgggttgaagttcaaaattgatcagctagaagaattcaacaatgcctcgctatgatgataaatacggcaatacccgcctctatgtgggacacttgtcttcgaggactcgttcccgtgatctggagcgtgcctttagcagatatggaagagttcgaggtgtggatatgaagaatgatttcgcttttgttgattttagtgatcctcgagatgctgatgatgcaagatataacctggatggtcgtgaagttgaaggaaggcacgttactgtggaatttgccaaggggggtcctcgtggttcctgggaatcctcaggtcagggtcagggtccacctactggacctggacgatgttttgactgtggcttgatggtcattgggcccgagattgcaaaactggggatgggaagaacaagtgtttccttagtggggaaagaggtcatatagaaaagaactgtaagaacagtcccaaaaagttgagacatggatgaagtctttcaggtcacattctgctcatcatggcagaagaagggatcgaagctacagccgagaccgcagctacagtcgatcaatatctcctgtcggaagagaacgaagcccagtttctgaagatagatcagagtcctcaaccctcctagataagaaagcatagtgcatcacttgaccaaagcagtccacagaagagaggtgtcacatctcctggcagtgataggttggccacccggcaagatgggtctgactacagtggtggtcctagaaagaaaagtaggagccctgcaagggactgtgatgagggcggctatgatagccctaaagttaatgggcatagccgtagccttagggatgatgacaagagccccattgatgaagatgatgacaaccaccgtcgctcactgtcaccttgaaaagcactttctgataaaatggggtcaggatgtgacccagtttgtatctgctttgtatataaaatgcactccagcttaattctgtgacaattgtttatgaaaacggttttgtgtatggtatttttcagattcttgctggtcaaaaaaaaaaaaaaaaaaaaaaaaaaaaaaaaaaaaaaaaaaaaaaaaaaaaaaaaaaaaaaaaaaaaaaaaaaaaaaaaaaaaaaaaaaaaaaaaaaaaaaaaaaaaaaaaaaaaaaaaaaaaaaaaaaaaaaaagggggg

SEQ ID NO: 29841 - DNA, 1016 bp, Glycine max
  Clone ID: TF_GmC25809_2
gcggctgcgctgctgctaatagcgcgttgcatctgctacctatatacatattttcgccaaaccgccgattccgttgagcgtttctaccgtagcgctcagccgtgacaatctgtgcaagaactgcaagagacctggtcattatgcaagagaatgccctaatgtcgcaatttgccacaactgtggcctccctgggcatattgcttctgaatgtacgacaaagtcactgtgctggaactgtaaagaacctggccacatggccagcagttgtccaaatgagggtatttgccacacctgtggtaaagctggacaccgtgctagggaatgctcagcccctccaatgcctccaggggacttaaggttgtgcaacaactgttataagcaggggcacattgcagctgaatgtacgaatgagaaggcatgcaacaactgtaggaagacaggccacttggcacgtgattgtcctaatgatccaatttgtaatttgtgcaatgtttctgggcatgtggctagacagtgtccgaaagccaatgttcttggagatcgcagcggtggtggcggtggtgctcgtggtggtggcggtggtggctatagagatgttgtttgcaggaactgccagcaattaggtcacatgagtagggattgcatgggccccttgatgatttgccacaattgtggaggtcgtggtcacctggcatatgagtgcccttcgggtcggtttatggaccgctaccccaggaggtactgatgatgggaaatttatgcgttaccagttatatggatgtttttctatgatttctttgccgaggacagattgttgagtcttggtagtgtatgtgtttggctttattatttttaactttctagagtcatgacaatgatgccaatttatcggcaatttatagtttatgatatcgtgcttgtgctaggaataagaatttgctactgttaaaacatgttattgtatgcagatgtctggtgagactattttttattggttcagtgcaaaaaaaacaaaa

SEQ ID NO: 29842 - DNA, 2985 bp, Glycine max
  Clone ID: TF_GmC10165_1
gtacaaaattcccgaatcggcgcggggccatacattcccaaagaagaacgtggcctctctgctaaaccccttatcgtctccaaaaatggcttcttctatcataggcgtttcctccatttaccaaacaccccctctcgaactataccagaggccaagcactgcttccacttcctccgttaggttgcaatctttagactccaagtctcacttcaacaacctcctccgagcccaccgccactccactggcccgggcctcaagcctacaccatctttcgtcccctccgccgtcgccacccccaactcctccctcctcagcgaagaagccttcaaaggacttgcccgcgaattcgaccaaaacgacgaccaattcacccgcgcctcctccgccgccgaatccgttaaccccgacgaactcgacatttccaagctcgacttgccctcgcgtctcgttgagtctctccggagccgtgggattactcaacttttccccattcagagagcgttgttagtacctgcactagagtgtagagatatcattgcgcgagcgaagaccggtcatccggaaagacattagcgttcgggattcaaattattaaaggcctcactgaagatgagcacgcaccttctgaccggaagcctggtgagcttccgggagcttgggtgcttgctcctactagagagttggcgaggcaagtggagaaagagataaaagactctgcaccttaccttagcactctgggttggtctacattgcattcgtctggagctccagatactgcgctttggtgcggtgctgccggggcggtcagggcgcctcgttgagttgttgactcgctagacgcgaacggccttaggctcagtgaggttcaatatttggttcttgatgaagcggatccagatgcttgctgtggggtttgaggaagaggtggaaatgattctggcaactcttccatatcagaggcagagcatgcctttctctgccaccatgcccagtagggtgaagaagtaagcgataaaaaattggaacaatccgctaaaaattgatgtggtcggagaggatcaggaaaagcgagctgaaggggtaagactcaaggctacagaagcggctcccacgtaaaaaaattgataacatcacacagcattagtatgtatcagcaacaagggtcagatccaacaaagcaatcaccggcaaccggttttccggtgagctatagcaattcaacaacgtattcgaccaacgaggcttcctacgctccagtcccacctccccagcccaaacctcttgtcgattggtccaccggcctctgtgactgcttctccgaatgtggaaactgttgcatgacgtgttggtgtccatgtgttacctttggccgagttgcagaaattgttgacaagggatccacatcatgtggtgctagtggggctctgtatacgctgatttgctgtgtcattggctgtggctgcctatactcttgcttctaccgccccaagatgagacgacagtatggtctaaagggaaatggttgttcggattgcttgattcattgcttctgcgagccctgcgccctctgtcaagaatatcgtgagcttcaacaccgtggatttgacatgattattgggtggcatggaaatgtcgagcaacgaagtcggggagtagccatgactgctacaacagctccatcagtcgaaaatggcatgagccgttgaatagtatgcagttctgtaactaaaacagtttaaccatgaagaattagaaagatctgaagaatagtaattttttctgtaaggttcattttttatattcgatgctcttattaaaattgaagttttaatactttttaataatagtccattttattttttaacttttcttttcaacttatgtgttaccatttatattattgatgctctatttcaattatagatactgtattacttagtatgtttttcagcacctagaaaaactcgttttgaaaaaatccaaactaccctctttttatattaatgagcgtctaaaagttttttatttgagattctctgacatagatagaagtagccgaagaggttctacttctaggggaggttttagttctaggggaggttccgcttctagggaccggagaggttttaaatcctcacggggctgggatgtggaagactccggtgatgactttggtgatcaatccagtaggagaggtggtagaaattttaaaactggcaacagctggtctcgagcagcaggtaaaagcagtggcgatgattggctaattggaggtggtagacgatcaagcaggccttcatcatcagacagatttggagggacctgttttaattgcggggaatctgggcatcgtgcatcagattgtccaaacgtttcaaacagacgaagctttttttaagttcccacatatatatgtttgggcaccacttttgtccaaacgtttcaagacgtgagctgctgccactgtttttgacctaatgggttccggaaaattgaaagatgcttcccaaaacagttacagaatcaattttaatttgcatctctcgtgttggcgtgatctccaaagggacctctgtttttcgtggagtctcaatgaaatttagtatttgttttgggaagtggtattggataaagaatagcgttaacagtatgattatgttatcttatttttggggtgagtttgggggattgtatgggcctgtattctatttaaccatgttactagtatttaatatctttctgaaccttcctggtttaggaacagacaggaaaaatgaatgaaagatgaaatcccaaaggtttatgcagaagattcatttacattcactttttctgcgtcatatttaaacttttccgaatgtggaaactgtagcatgacgtgttggggtccatgtgtaacctttggcccagctgcagaaagtgctgacaagggatccacatgcctgaatactgttttctatatcagatcagaacatacctagaag

SEQ ID NO: 29843 - DNA, 685 bp, Glycine max
  Clone ID: TF_LIB4390-027-Q1-N1-B2
gaaggataaaaatttaatttttatatacattttgtgatttttttaacatttaaatatgacgcagaaaaagtgaatgtaaatgaatcttctgcataaacctttgggatttcatctttcattcatttttcctgtctgttcctaaaccaggaaggttcagaaagatattaaatactagtaacatggttaaatagaatacaggcccatacaatcccccaaactcaccccaaaaataagataacataatcatactgttaacgctattctttatccaataccacttcccaaaacaaatactaaatttcattgagactccacgaaaaacagaggtccctttggagatcacgccaacacgagagatgcaaattaaaattgattctgtaactgttttgggaagcatctttcaattttccggaacccattaggtcaaaaacagtggcagcagctcacgtcttgaaacgtttggacaaaagtggtgcccaaacatatatatgtgggaacttaaaaaaagcttcgtctgtttgaaacgtttggacaatctgatgcacgatgcccagattccccgcaattaaaacaggtccctccaaatctgtctgatgatgaaggcctgcttgatcgtctaccacctccaattagccaatcatcgccactgcttttacctgctgctcgagaccagctgttgccagtt

SEQ ID NO: 29844 - DNA, 5146 bp, Glycine max
  Clone ID: TF_GmC2654_4
tcatgtgtataatagagctcagaggcagcaatccatggatgagtccaatatctcaagagggcagcggttttctccaatgtagattccaaaagctcggctggttctgacccttcaatcaacttctataggccacttcacttgcacaagagttcagttatgacacgttgaaacggataaggctcagcttcacggtgtgatgtgaatctggtggaagctcaatatctccgtgtactgaatagtaccattcttgtccaagaagttcagcatcttgttgttccatgcaatttacattgagttagctagctagaagtagctgttacatgtctggtgtaataaatgtcaggtgttgattatcacttcatttgcatgtcaattaccactccctcattttcaagtctccaatttgcacatccctcacaatgcaagtccacaagcacacatggtaaggtggtttaggctccttcttctagcctgtgtccctatccttcataagcatatcaaagtcaagtctcagattcttaaatccactaaacttaatgcttatatagttagtttttatcttatttgaaataaataaatcacataccttttgagatacttaagatgatgtgttccaatctctacatgttgagcttgctaccttgacttcgccaactagtgcagtttaattcaagaaaatgatgagtcaaattgctgtaagttaagaacaccgtgtattcctgttaattgttgttatcatgaaagtttctatgatgtagcatgggttagacgttccatgtgtgtggagttgcggatttggtatctatgagctgccaatgcttggaatgccagtttatttatcagctgttcataaagcgactatttgatatttcatttttgaatttacaatgcagctctgttcttttgacaccgaaaagctcttacctgctctgagattggtttccttgtcaattgtggagtaataatcttccccattggttacattcactggtgccgcgtatctttcaaacattgtggggacttcagtatctgttgctcccatttccattgtttcatttacaaatttgatgactctatacaacaagtgctaatgcacgaaaatatgattatttgaagttgtagtatgctgaccctcattctcagctacagcaggcctattttttttcttttcattcctgagttattctgtcgcccctgagttcttcagttgtgacccctccacactcttcataggagctagcttttgtttatgatcaatgggagttcttacccgcgaacaatctataaaattaaatttctccaatatcttctcaatataatgtgattgagaaatgaaaattaagatgtgttcacgtttgatctttattcctaagatcacagcagcctgccccatttcttgcatatcaaacgtagaagaaaaaaatgtcttagtttcatcaacttgatgctgatcgataccaaagatcaagtgatcgtctacacacagacaaatgataactcctttgcaatgagtatcaaacttgctatatagacatttatctgcttggtttagaacataatcactagacaacacaacctcatcaaatttttgatgccattgattaggcgcttgtttcaagccataaagagatttcatcagtttacacaccttattttcatttcctggcataacaaacccttcaggttgtttcatgtatatctcttcatccaattcaccatttaagaatgcagttttcacatccatttggtgaatcaacagattgtggatagcagcaagtgctaacaacagtctaatagtggatatcctagcaacaggagcatatgtatcgaaaaaatcaataccctctttttgcctaaagccttggataaccaatctggctttgtacttgtcaacagtaccatccactttcatctttctcctaaagatcatcttacatcctaatggcttacatccaggaggtaagtcaaccaatttccaggtattattttgcatgatggaatccatctcactttggattgcttctttccagaatacagcatcccttgaagccattgcttcactaaaggtctttgggtcttcctcaacattaaggcaatattgatattgaaattcaatatcattccttgacccttcaaccaaatagagttgaaagtcatcaccaaatgacttagcttttcttactctcgtactctttctagtttcagtactagttaaaggtatatcctcaatattaactgagactttcgacatggaattcatgtcctttggcctaggtatagatgtaaacctttgttcatcaaagatagcatcccgtgactctataaccgagttcacagcaacagaatcattagattctagcacatagaatctatatgctttagaatgttcagcatatccaataaatatgcaatctatacctctttcacctatggttttccttttaggttctgtaagcctgactacagccctacatccccaaattttgagataactcaaatttggtgtctttttgtgccaaagttcatatggggtaaccttattccttctgttaggaattcggttcaacaagtaacaggctgtcagcatagcctcaccccaaaatccttcacttaaacccgaataggataacatggaattcaccatttctttcaaggttctattcttcctttcggctacaccattctgttgtggtgtatagggagctgtagtttgatgtattattccagtagattgaaaataaaccggatcataatactcacctcccctatccgtacgaagagttttgattagcccattttgatgaagttctacctctttcttataaattttaaatttatcaagagcttcatcttttgtatttaataaatatgcataacaataccttgatgcatcatcaataaaagtaacaagatattttttatgacctaatgatggagtagcatgcaaatcacacaaatcactatgaataaggtctaagactttagtctcacttttaacatccttaaaaggtttcctagtgatcttggtcaacatgcaagttttgcatttttcaatgttcatatcaaaaggaggaatcatacttgtttttgacatatcttttaatcttttgtaatgaacatgtcctaatctagcatgccaaatttctgattttgtcatattagttatagaactacacgaggccatacaaacagattcatgaacaaaaggaacatcaatgtttaatttaaacattccattacaacgataaccaaatccaacaaacgaaccatgtcttgacaagatgtacttgtcactttcaagtacttgcttgaaaccacaattatttaaaaccataccagacaataagttcttacgaataccaggtacaaataagacattatccaaatacaaactttttccggaagtaaaaactaaattcacacaacctaatcctaggattggttcagttgcaacattgcccatcttcacaatagagccatcatcgattggtctaaattccttgaaccaacgacgatctttgcacacatggcttgttgctcccgaatcaaaccaccaagcaacgtcatcatcctgcacatagaatgcattagatattagtgatacataatttgaattcgtattcgaattaaaattattcactacaatctgaccttgtcgcttttcaggatcattagacccacttggaccagccttgttctttcctttgaacacccggcaatccctctttaaatgaccaggtttcccacacttccaacatgacaattttgtctgtttgtttggacctttgttcttatttccttgaaattttcgtttgttacctttagcattgtaattttgcttaactgttccactttcctctaccatattaacggaagaggaacctgctacggttttatcattgactttgtcaatttcctgagccctcagcgactcctcaatcatgaaatgactaccgagttgaaccagagtcaactcttccttcttatgtttcaaggtatgcttgaagtctttccaagaagaaggcagtttatcaattatagatgaaactgcaatggattcatccattttcaaatcatgttgagtaaactgacccaaaatccgcagcagttcattatattgctccataacaggcctcgaatcactcattttgtaattaaagaaattactaactaagaatttgttacttgaggcatcttctgccatatacttggattcaagagagtcccataattccttagcagactcaatattttgataaatatcaaagagagagtcagacataccgttcagaatgtgtccacgacaaatgtaatcgtcgttctcccatttcgaacgcttccttgtttgatccagagtttcgtcttccatatataccggcatcggtgtgctcagcacatacaccactttctcttgacaacattgaaagtggatcttcttctgccatcttctgaaatcctgcccttcaaacttgtccaacttcgcaaacttgcttgtcatcttcgaactatcgttcgtcatctcgaaagatttgattcaatcttttgttggttaattttgaaaatcgagataatcctggataaatctgaagtcgtgtataaacactttcagattgaatcaaatttcggggttcaaccaaaattgttcaatcggataaaatcagaagattataattcaagagttttgttttggtcttgtgagtttttcacatgttatgctttctgaaccaggatgattatttataatcaaagaacaggtggtttttggcggttgatggaagttatttatttttaaaaatgccgttgatggaagttttaggtaacttccatgtaacttccaaccgttgatggaagttagtaacttccatgtaacttccaacctttgcctaaaccgaacatctcgttattacattaaaacaagcgtgcactcttattttaacataataaagagatcaattacactaaaatgtccaacactcccccattttagtgtaattaccgatcaaatcaccaaagtcataacataccacaaactactgcatagatgaaatatcgtgacgattgaatttcatcttagcaaattacacgtttcaaatattcgaatatcagggtgtcactaaggattgcccttctgtcgtcttctcgccga

SEQ ID NO: 29845 - DNA, 719 bp, Glycine max
  Clone ID: TF_LIB4391-053-R1-K1-G3
ccccgcgtccgcggacgcgtgggttctacttaaatgcattggttaaggaagccaaagaagattgaagtatgcttttactagaagaggctttgaatctttattaagctgtttataaaaccctaagtatgaccaatttattttctgttcttgtggtttgcaatcttcttactctggctgctgctatgattagtttgaaacttaagtgatgtgctttgcctctcaaacagagcgggtgcatttactcaaagccatctgacttttggaacatgagcatgcatttcttacaatggcaacacttaggtttttttgtcagccgtgacaatctgtgcaagaactgcaagagacctggtcattatgcaagagaatgccctaatgtcgcaatttgccacaactgtggcctccctgggcatattgcttctgaatgtacgacaaagtcactgtgctggaactgtaaagaacctggccacatggccagcagttgtccaaatgagggtatttgccacctgtggtaaagctggacaccgtgctagggaatgctcagcccctccaatgcctccaggggacttaaggttgtgcaacaactgttataagcaggggcacattgcagctgaatgtacgaatgagaaggcatgcaacaactgtaggaagacaggccacttggcacgtgattgtcctaatgatccaatttgtaatttgtgcaatgtttctgggcatgtggc

SEQ ID NO: 29846 - DNA, 798 bp, Glycine max
  unsure (1)..(798): unsure at all n locations
  Clone ID: TF_GmC111765_1
ggagtctnnnncacacgtttgcgcattgaggaagaggcatgcagacaagatcagaaagatgaagtgttggttgtgtctgacaacaacaataaaaggaagaacacaggtgcagttctgaagcctactggctaaaactttaagaatcagaaccgcaatgtgaacaatacctccaaccgcaacaagaaccccacaagggtccaacatgctagacaacatccacctgccaagaataatcctggtgaaccattcctctgctacaattgtggcaaaccaggacatatggcacgtaaatgcagaaatccttcaatgacaggtgctccccagtctaacatgactcaagaaccatacatagctgtgataactgagatcaatatgattggaggatcagatggatggtgggtagacactggcgcctcccgccatgtttgctatgatcgtgctatgtttaaaacatacacgaatgttgaaaataagaaagtgctgctgggtgattcccacaccactactgttgctggaactagagatgttgaactgaagtttacctctggaaagactttgatcctcaaagatgtgatgcatactccagagatgagaaagaatctggtttctggttttcttttaaacaaggctgggtttacttagaccataggtgtagatttatttactttgaccaagaatggaatatttgtaaggaaagggtacgccactgatggcatgttcaaattgaatcttgatattaataaagtttctccttctgctttcttgctatgtgattttaatatctggcattatagagtc

SEQ ID NO: 29847 - DNA, 1437 bp, Glycine max
  Clone ID: TF_GmC17809_1
cacgcgtgcgtctcgagcggcacagttcctcatatgggctgcgagaagtcgacagaagggggtgagcgttatcgtggagttcaacttcgagggtttccttcacaactctgtaatttctaattccacagttactcttgtgttttagcgagattcggagtgagtgatggctgggaaggaagagaatcgaatatttgttggaggtttatcttgggaagttacggagcgtcaactcgagcatgcctttgctcgttacggcaaaattctcgaatgccagatcatgatggaaagggatacaggccgtccacgtggatttgggtttatcacatttgcagaccgtaggggaatggaggatgcaatcaaggaaatgcatggacgggaaattggtgatcgtatcatctcagtcaacaaagcacagcccaagatggggggtgatgatgcagaccaaggttacagaggtggctactcatcaggtggtaggggaagctatggtgctggagatagggtaggacaggatgactgcttcaaatgtgggcgtccagggcattgggcccgagattgtcctttggcaggaggtggtcgtggtcggggtggtagctcatttccttcacgtcctaggtttggagctgctggtggacatggggatcgtctaggtggtgaacgtgatcgatacgttgatgatcggtatgagggaggacgttatggagatagggatcgttttgacaaccgtgactacaaatatggcagccgtgatcgctatgctagtgacaggtatccaaccagtggagatcgattcgcaagtgatcgatatggcggtggctcagattacccgcaaaatggttatggcaaggaaagagggtatgaccggtatggtggtccacgaggaggtgctgataggtatggaagtggaatgggaggtcgtgatgaaggaaggagttataggggtagacctggtccatatgaccgcccaagcaggggttctcgttcatcacttgatcgctactgatttctaacgctgatgtttttaacgggaaatccaaatgcagaagccacattagagacctagttcttgttcttgttgttacgtaggacatcctgtttgggacaactgttgctgctagattgtagtttcatagattatggatttcgtagtttgtttccctatttatagatcgtgccaatccctgttgattttccccctcctttgcctgacgctttgactaacttccctaatgcaagtaagcatgatttaccgctgcattccgaaataaaaaaaaaaaaaaaaaaaaaaaaaatgaaaaaactaatttcaaagacaggtataaatgttcgcctaggaagagtacaccggtgcaagtgacatgtgttaattgaattacgtagatacgtagaattggtataactcatcattattttctgtcttaatttttgattcaacac

SEQ ID NO: 29848 - DNA, 250 bp, Glycine max
  Clone ID: TF_GmC986_9
cgacggtggcgggaggtacgttggtggtggaggctgcggcgtcggcggatgaagctgctacagctgtggagagtctgggcattttgccagagattgcccatcaagtgctcgttgaatttactgttagggttgtttatgttttgcggattgttttaagtttttactttaatatgtcttagggattttaatggtttctgtccaaactatgggttcttatgagtagatgtgtggatttatccttgtttgtctc

SEQ ID NO: 29849 - DNA, 1991 bp, Glycine max
  Clone ID: TF_GmC10165_6
aggaagacgtggaaatgattctagagaatcttccagctcaaaggcagagcatgcttttctctgctaccatgcccagttgggtgaagaagttggcgagaaaatatttgaacaatccactcacaattgatttggttggtgatgaagaggaaaagcttgctgaagggataaaactttatgctatagcagccactgccacttcaaagcggacaattctttctgatcttgtaactgtttacgcaaagggtgggaagactatagtttttacacagacaaaaagagatgctgatgaagtatcattgtcattaacaaatagtataatgtctgaagcactgcatggtgatatatctcagcatcagagagagagaacactgaatggtttccgtcaaggaaaattcacagtgcttgttgccactgatgttgcagctcgtggactggatattcccaatgttgatttgattatccattatgagcttcccaatgatcctgagacttttgtgcatcgctctggtcgtactgggcgtgctggaaaacaaggtaatgccattctgctgtacaccagtagccagaggagaacagttagatccctcgaacgtgatgtcggatgcaagtttgaatttgttagtgcaccggctatggaagaggttttggagtcatctgctgagcaggttgttgccacacttggtggagttcatcctgagtctgttcagtttttcacccctactgcacagagactgatcgaagaacaaggaacaagtgcccttgcagctgcacttgcacaactgagtggattctcccgaccaccatcatcccggtctcttatcacccatgaacagggatggattacattgcaactaactcgagattcagatagtagaagatatttttcagcaagatcaatcactgggtttctttctgatgtttatcctgcagctgctgatgaagttggaaaaatccatttaattgcagatgaaaaggttcaaggagctgtttttgatcttcctgaggagattgctaaagaattacttaatagggacataccacctggaaacaccgtttccaagatcaccaagctaccttctttgcaagatgatgggcctccaagtgatttctatgggaggttctctgacagagatagaagtagccgaagaggttctacttctaggggaggttttagttctaggggaggttccgcttctagggaccggagaggttttaaatcctcacggggctgggatggggaagactctgatgatgatgactttggtgatcgatctagttggagaggtggtagaaattttaaaactggcaacagctggtctcgagcagcaggtagaagcagtggggatgattggctaattggaggtagtagacgatcaagcaggccttcatcatcagacagatttggaggggcctgttttaattgcggagaatccgggcatcgtgcatcagattgtccaaacccttcaaacagacgaagcttttaagttcccacatatttatttttgggcccccctttgttcaagacgtgagctgcttgctgcccctgtttttggcctaatgggttccggaaaattgaaagatgcttctcaaaagagttacagaattgatattaatttgcatctcacgtgttggcgtgatctccatagggacctctgtttttcgtcctgagtctcaatgaaatttagtatttgttttgggaagtggtattggataaagaatagtcttaacagtatggttatgtaatcttatttttggggtgagttgggggattgtatggttctgtattctattttaaccatgctactagtatttaacatctttttgaaccttcctggtttaggaacagacaggaaaaatgaatgaaagatgaaatcccaaaggtttatgcagaagattcattttcattcacttttcctgcgtcatattttcaagtattaaataaaatcataaaatgtcatccttttctgcataaaaaaaaaaaaaagggaggg

SEQ ID NO: 29850 - DNA, 1027 bp, Glycine max
  Clone ID: TF_GmC173_13
aattcggctcgaggtggctagtgctgtgtatatgaagtacttatgtttcgctagctttccgttcttctctttttgttcgcttcggctcctttaggttttccttccgtgcgtttactcggaactactcttccactcttcgtttaaaatgtctgacgtggaagagtatcgttgtttcattggtggccttgcgtggtcaacatctgatagaaagttaaaggatacgtttgaaaagtttggcaagcttattgaggcaaaggtggttgttgacaagttctctgggcgttctcgtggttttggatttgtcacatttgatgacaagaaagcaatggacgaggctattgatgctatgaatgggatggatttagacgggcgaactattactgttgatagagctcagcctcaacaaggatcaactagaggtgatggtgatcgctaccgggatcgtggtcgtgatcgtgaccgagatcatggaggtggaggtggccgaggatctaatggtggtgaatgctttaagtgtggaaaacctggtcattttgctagggagtgccctagtgaagggtccaggggaggaaagtatggtggtagggaaagtacatatggtggaagcagtggtggtggttatggaccagatagagcagatcgttcttcaggggggcgcagcaggggatggtggtagtcatggagattctggaagtgatcgattttatcgtgatcgttcaggaccatatgagcgagagcgacggggatcaggaggctttcgttgatatcatgtagtctttcaatgagatgtgaaattgaagaggttgctgttaatgcttcaactttccttttcattcgcacttgacaatgctctgtggacttctgggattgttgtttggatggatcattgataccagtattttgatatgcaatactcagcacattatgcaaactctttatgttcctaaatgctgatcttttggtcttgtgaaatcttatgcatgcttgacttgaggtcaaattcgatgttgagatcaatgctatctat

SEQ ID NO: 29851 - DNA, 1598 bp, Glycine max
  Clone ID: TF_GmC45275_1
ctcgggccggagtggagctgttacggctgcgtggggatttgcgtcgccgcaagcattgcagagtgacagcagcagcagcagcagcttggtctgaggttagagatggttagccaaaggcagcgacttgctcgaaagcgatacaaagcggaacaccctgagctctttccgaagcccgagcccacaccccccaaagaccccgagaagaagaaaaagaagaagaaaaacagcgctttcaagcgcaaaaggcccgagcccaagcccggctccagaaaaagacaccctctcagagtccccggcatgaagcccggcgagagctgtttcatctgcaaggccatggaccacatcgccaagctctgccccgaaaaagcagaatgggaaaaaaacaagatatgtttgcggtgtcgacggcgcggtcatagagctaagaactgcccctgaggtactagatggcgccaaggatgccatgtattgctataactgtggggaaaatggtcactctctcacacaatgtcctcaccctctacaagaaggagggacaaagtttgctgagtgctttgtctgtaatcaacgtggacacttgagtaaaaactgtcctcaaaatactcacggcatttatccaaagggtggttgctgtaaaatttgtggtggtgtgacacatttggcaaaggattgccctgacaaagggaagagtggatctgttgctgctaacaggcctgctgatggatggatgagaattgaagagaggcctatgggtcaggttaccaaatttgtcagcggggatgatattgaggatgacttcatgacagatgacatacatagtgcagacaagaaaaagccagcaaagtcaacagaagaccatgtaaaaccaaagaagaaggagggtcctaaagttgtgaacttttaactaaggatagttacctcataatgtattgtgtggatatttgtttccactcaccatttctttcctgttctatccacaaggctatggtagacccctgaatcccttccagaatgaatgtaatcgctcctgcaaagtcttgggttgcctaaatgtttggagaattgacatgaaaactaggactatcgcctctcattgctgatcataaattctacagtgatttgtaaaaggtaactgaaaatgtaactattttttggtacaagtactagtttattatttatctttactttgttgatcgactttcggtgcaatattgttactaatgagaggcgatagtcctagttttcatgtcaggttaccaaatttgtcagcggggatgatattgaggatgacttcatgacagatgacatacatagtggagacaagaaaaagccagcaaagtcaacagaggaccatgtaaaaccaaagaagaaggagggtcctaaagttgtgaacttttaactaaggatagttacctcataatgtattgtgtggatattggtttccactcaccattttctttcctgttctatccacaaggctatggtagacccctgattcccttccagaatgaatgtcatcgctcctgcagagacttgggttggcgtggggggggggggggggggcgtgaaagctggggactgtgggtctggttgggggg

SEQ ID NO: 29852 - DNA, 603 bp, Glycine max
  Clone ID: TF_GmC85470_1
gggtcagtccgttaagtttctcctcaattacgggaacggcggccgcaccatgaccgtggaggtcacttccgccgttagatctcgccgtacagggggcttccgcgtcggagtagggaggggaaaaggaggaggcctcggcggagggttcggtcgaagagcagcaggtcctgagtgttataattgtggaagaataggtcacttggcgagggattgttaccatggacagggtggtggtggtggtgttgatggtgatggtaggaatcggagacgcggcggcggtggcggtggaggaggacgagggtgttttaactgtggggaggaagggcattttgtgagggaatgtccggatgttggggaaaggaaatgagtgagaatgtgttatgttatgatttcttctgttgaattgtgagtatgttacagtcatcagttggggttggttacatggattctgttatttttgtttctagccattggcattaatttgcttccaaacatattttccacgctttgctaaattgttttatcttaatgcgcttcttttcaacaagtgatcgattatatatggtttgaatatgaatgtatgaagcaatggaacgcttaact

SEQ ID NO: 29853 - DNA, 621 bp, Glycine max
  Clone ID: TF_GmC104291_1
ggaaccgcaacagggtgttacaagtgcggcaaacctggtcactggtcacgagattgccctttctccgctcccaatccaaaccctaactctaacaccgccaccactcccaatcccaatactccaaatccttcttcgtcttctttcaagtccagatccgccaccgaaaagcccaagaaactcccccgaacaaagcccaagctcacaccggagcttcttctctccgacgagggtctcggttacgtcctccgctacttccctcgcgagttcaaataccgtggtggtggccacgaggttcgcgatttgggtaacctgcttcgtctgtacaccgaatggcactctcgcttgctcccttattactctttcaatcagtttgttcacaaagtggagaaagttgctgctacaaggcgtgtaaagacttgccttagagaattgagagaaagagttgcaagtggtggagatccaacaaaactgcgtgaaccacctgttgtgcatgacattccatctgatgagcacggatatgttgtatctgcagaagatgggggagcaactcatcaagagacagatgtgtttgcagaatccgaaaatgttaatgacattcaagaagacatgcttaatgatata

SEQ ID NO: 29854 - DNA, 1142 bp, Glycine max
  unsure (1)..(1142): unsure at all n locations
  Clone ID: TF_GmC9855_7
tcctcgcgtccggtttttctttttctcttctcactgcatcgcttcaggttcttctgaaaagatgtctcgcgtgtatgttggtaacttggattcacgagtcaccgagagagatctcgaagacgaattccgcgttttcggagttattcggagtgtttgggttgcacgtagaccacctggttatgcttttattgactttgatgaccgcagagacgcacaggatgctatccgtgaattggatggcaagaatggttggagggttgagctttctcacaactctagaggtggaggtggtggtcgtggtggtcgctctggtggttctgatttgaaatgttacgagtgtggtgaacctggtcattttgctcgtgaatgccgcatgcgtggtggttcaggaagacgccgtagccgtagtccgcccagattccgtaggagcccaagttatgggcgaagtcctcgtgggcggtcccctaggcaccgcagtttgtcacctcgtggacgtagctacagcaggtctcctccttatcgtgggcgtgaggaggttccttatgctaatggcaaaggacggaagaatattaggcatgatgagtgatgactggagtagaaatggccttagggaacgacgcagaagcagaagttgattttgagagtttggtattgggtatctgtgattgttaagagaatagtcagattttgttaatttagtggtgctttgactgaagtatgagtctgttttgttgggcaaggccctgagtttctactcttggattggaatagttagtttattttatgtctcagcttgtgttgaatttatctttgcttgtagtttcattgcaggtaatgatcttgttaaggttgttgttactagtttgttaaatatagttccagatctttctgcactngttttcctcaactagctagttaagtcttctttttggcctatggggcaagcagatgctgctctctctttcttctacttctgccttggcctgcagtacatggttttttcttggcctgtgtctttcgtcaaagtctgctgctttgtacagtttgactacttctactactactgcatgtaaagagaattacgaatgtgaacacaggngatttgcactgctatcgcgagctacacttctgttgcataatgg

SEQ ID NO: 29855 - DNA, 769 bp, Glycine max
  unsure (1)..(769): unsure at all n locations
  Clone ID: TF_LIB4167-066-Q1-N1-F3
aacaacaaccttaacaagatcattacctgcaatgaaactacaagcaaagataaattcaacacaagctgagacataaaataaactaactattccaatccaagagtagaaactcagggccttgcccaacaaaacagactcatacttcagtcaaagcaccactaaattaacaaaatctcactattctcttaacaatcacagatacccaataccaaactctcaaaatcaacttctgcttctgcgtcgttccctaaggccatttccattagcataaggaacctcctcacgcccacgataaggaggagacctgctgtagctacgtccacgaggtgacaaactgcggtgcctaggggaccgcccacgaggactgtaactccttcgcccataacttgggctcctacggaatctgggcggactacggctacggcgtcttcctgaaccaccacgcatgcggcattcacgagcaaaatgaccaggttcaccacactcgtaacatttcaaatcagaaccaccagagcgaccaccacgaccaccacctccacctntagagttgtgagaaagctcaaccctccaaccattcttgcctgctccatagaatagaaatgaaaaggcccaataaataaaaaagtgacacaaaactaatagtaatccaagtagctacgctttctacactaaattgtatgaaagcagcagctgtattcagtaaagtttaaagtttaaaccctaaagagaaacaatttcaccaaaatacatcacattgccattagcttaa

SEQ ID NO: 29856 - DNA, 622 bp, Glycine max
  Clone ID: TF_LIB4204-002-Q1-K1-E1
cccacgcgtccgtacggctgcgagaagacgacagaagggggctcactctctagggtttttatttctctcttctctctgcatcgcttcaggttcttctgaaaagatgtctcgcgtgtatgttggtaacttggattcacgagtcaccgagagagatctcgaagacgaattccgtgttttcggagttattcggagtgtttgggttgcacgtagaccacctggttatgcttttattgactttgatgaccgcagagatgcacaggatgctatccgtgaattggatggcaagaatggttggagggttgagctttctcacaactctagaggtggaggtggtggtcgtggtggtcgctctggtggttctgatttgaaatgttacgagtgtggtgaacctggtcattttgctcgtgaatgtcgcatgcgtggtggttcaggaagacgccgtagccgtagtccacccagattccgtaggagcccaagttatgggcgaaggagttacagtcctcgtgggcggtcccctaggcgccgtagtttgtcacctcgtggacgtagctacagcaggtcacctacctatcgtgggcgtgaggaggtcccatatgctaatggaaatggcccttaggaacga

SEQ ID NO: 29857 - DNA, 1576 bp, Glycine max
  Clone ID: TF_GmC174_3
aaacccatacttggtccggaatcccacgcgtccgtccaagataccacttgaaagggttaggtttcgggagaaaaaccaatccactcagagctagaagaattcaacgatgcctcgctatgatgataaatacggcaatacccgcctctatgtgggacacttgtcttcgaggactcgttcccgggatctggagcgtgccttcagcagatatggaagagttcggggtgtggatatgaagaatgatttcgcctttgttgattttagtgatcctcgagatgctgatgatgcaagatataacttggatggtcgggatgttgatggaagtcgtattattgtggaatttgcaaaaggggctcctcgtgggtcccgggaatatttggggcgaggtcctcctcctggctctggacgctgctttaattgtggccttgatggtcattgggcacgggattgcaaagctggggattggaagaataagtgttaccgctgtggggagagaggacatatagaaaggaactgcaagaacagccccaaaaaattgagcaccaggcgaggacggagttattcacggtcaccagtcaggtcacattcacctcatcgtggcagaagccgtgatcgcagttacagccgagatcgcagctacagtcgatcacgatcccctgtcagaagagaagaaagccctgttcgtgaagataggtcacaaagccctcaacacaaaaatagtcctcagccctccaagacaaggaagcatagtccatcacctgaccgtagcccacagaaaagaggtgacacatctcccgacaatgataggttgagtagaagccctgcaagggaccctgaagataggggctatgacagccctaaagttaatggtcgtagtggcagccctagctgtagccccagggatgatgacaggagccccattgacgatgacaacaaccaccgccactcgccaagaggcagcgagtcaccttaagtatttctcagagaaagaactctgtatgtggcctataatttatatctgctttggttatctgatgcactttgctgtgaagatcggggcaatttttagcttaaaaggaaactttatgaattgtttatggttatgaagaacggttttatgtatgggtattattcagtttatcttttgttgcgcaatgtatggcttacaaagaatataacctgcctcaatttgtgttgaaacattgtgaattatgagattaaagcctgcctgaatttgtgttgaattatggggtttctgaggttttctctaaacctggaggtctttgttgggaggttggacttggtggaattgatggaaattcctgtcgagtgttgactttggcgattctttctgtaatgttattgcgtgttttttatggaaatggcaacaatcacaaactggtgtttagttcgtctttgaggggtgatgtatcatacagttccagtagttaagtaatgatggccttattgtttctggcaaccatttccgcagaattcgaggtgtagatatgaagaatgattttgcctttgttgaatttagcgatcctcgggatgctgatgatgctagatatagcttgga

SEQ ID NO: 29858 - DNA, 882 bp, Glycine max
  Clone ID: TF_GmC92326_1
cggctcgagctcgagccgcgacgtcaccggcgtcgacggcgggcctcttcagccccgcgcagccgccggcaacaacaaccgcgccgccggctctggcttcggtttcggcgccaggcgcaatggcggaggcggcgccgcgtgctaccagtgtggcgagtttggacacctcgccagggattgcaacaggagcagtaattctggtggcggcggaggcggcagcggcggtggttgtttcaattgcggggggttcggccacctcgcgagagattgcgtgcgcggaggcggcggcagtgtaggcattggaggtggtggcggaggcggatcttgctttaggtgtggcggatttggacacatggcgagggattgcgccaccgggaagggcaacattggcggtggaggaagcggtggaggttgttttcggtgtggggaggttggtcatttggctagggattgcggcatggaaggagggagatatggcggtggtggtaacagtggtggcggcggcggtggaaaaagcacgtgctttaactgtgggaagccagggcattttgcaagggaatgtgttgaagcttcaggttgaggtgaagaagggtttatgacgttttgcgaagggagaaaaaaggtggaatagtacatattctctttttttgcaccttttaacagttattaacttattattattattatttcggggaagtttatacatatggcaaaaaaaagaagattgtctggttttgggttttttgactatggtactgcttcagcaggcgattttgccttctcttgtctttcttgttacagaactgttgagatttatatcttaatttatttgtctgaaaggtttattatcaatatgatcataaatttagactagtgttctcg

SEQ ID NO: 29859 - DNA, 1623 bp, Glycine max
  Clone ID: TF_GmC25809_1
tacggctgcgagaagacaacagaggggcgcgtccgaaaaaaccaactttgcggctgctctgctgcaaatagcgcgttgcatctgctcccaatcattcatataaaaaaaaacaactttgcggctgcgctgctgctaatagcgcgttgcatctgctacctatcatacatattttcgccaaaccgccgattccgttgagcgtttctaccgtagcgctcaggaaggaggcagtggctggtggtgttggttgtggtggaggtggttttgctgatcatttgtggtagagggtaggaaagaaaaaaaagttgaaaatgagttcagacagccgcagcaggagcagaagcaggagcccaatggaccgtaagatccgctctgatcgattttcctatcgtgatgcaccttacaggagagattcacgtcggggtttcagccgtgacaatctgtgcaagaactgcaagagacctggtcattatgcaagagaatgccctaatgtcgcaatttgccacaactgtggcctccctgggcatattgcttctgaatgtacgacaaagtcactgtgctggaactgtaaagaacctggccacatggcctgctagttgtccaaatgggggtatgtggcacacctgtggtatagctggacaccgttaaggagggtgctcagcccctccaaatcctccaaaggagtagaggtttgcaacaactgtaggaagacaggccacttggcacgtgattgtcctaacgatccaatttgtaatttgtgcaatgtttctgggcatgtggctagacagtgtccgaaagccaatgttcttggagaccgcagtggtgcggtggtggcggcggtgctcgtggtggcggcggcggtggctaccgagatgttgtttgcaggaactgccagcaattaggtcacatgagtagggattgcatgggccccttgatgatttgtcacaattgtggaggtcgtggtcacctggcatatgagtgcccttcgggtcggtttatggaccgctaccccaggaggtactgatgatggtatgcgttaccagttatatggatgtttttctgtgattttctcgccgaggacagattgttgagtcttggtagtgtatgtgtttttgccttattatttttaactggctagagacatgacaatgcttgtgctgggaataagaatttgctactggtaaaacatgtatgggatgcattgggttgcctgatgaggttattttttattggttcagtacaagtttttatgtcgttagtttttcctttaacccttctcttcttatgccttattaatgtttgttttattgcgacgggactctctgttagggttagggttagggttaaattcgattcggattcatcttgtcgaatttgggtacgatttccttcagtttccctcattttccgatatcgatgcttggggtttcgtttcgccttgattccctgtggtgcttaccgttatcggctcttcttagggttccgattccgaatctgtaatttacataaggtttggacgtgacggatttatgacttttgatgtgtgttttcctggtaatggttgacgatctatgtttctacgcgtaagattgaacggttttcccaaaaacaactttgctcggatgt

SEQ ID NO: 29860 - DNA, 516 bp, Glycine max
  unsure (1)..(516): unsure at all n locations
  Clone ID: TF_GmC92326_2
ggggttcggccacctcgcgagagattgcgtgcncggaggcggcggcagtgtaggcattggaggtggtggcggaggcggatcttgctttaggtgtggcggatttggacacatggcgagggattgcgccaccgggaagggcaacattggcggtggaggaagcggtggaggttgttttcggtgtggggaggttggtcatttggctagggattgcggcatggaaggagggagatttggtggtggtggcggaagcggcggcggcggtggaaaaagcacttgctttaattgtgggaagccagggcattttgcgagggaatgtgttgaagcttcaggttgaggtgaagaagggtttgttacattttgcgaagggagaaaaaaggtggaatagtacatattctcttttttggcacattttaacagttattaacttatgattagtctctcttattgttattattattattcatctaatttcggggaagtttatacatatggcaaaaaaaagattgttttggtttt

SEQ ID NO: 29861 - DNA, 1253 bp, Glycine max
  unsure (1)..(1253): unsure at all n locations
  Clone ID: TF_GmC25809_3
cggccgctcgaggcggcgggcgggaacaaattaaccaactttgcggctgctctgctgcaatagcgcgttgcatctgctcccaatcattcatattctcgccaaacagccgattccgttaagtgtttctaccgtagcgctcaggaaggaggcattggctggtggtgttggttgtggtggaggtggttttgccgatcagttgtggtagagggtaggaaagaaaaaaaaagtggaaaatgagttcagacagccgcagcaggagcaggagcagaagcaggagcccaatggaccgtaagatccgctctgatcgattttcctatcgagatgcaccttacaggagagattcacgtcggggtttcagccgagacaatctgtgcaagaactgcaagaggcctggtcattatgcaagagaatgcccgaatgttgcaatttgccacaactgtggcctccctgggcacattgcttctgaatgtaccacaaagtcgctgtgctggaactgtaaagaacctggccacatggccagcagttgtccaaatgagggcatttgccacacctgtggtaaagctggacaccgtgctagggaatgctcagcccctccaatgcctccaggggacttgaggttgtgcaacaactgttataagcaggggcacattgccgcggaatgtacgaatgagaaggcttgcaacaactgtaggaagacaggccacttggcacgtgattgtcctaacgatccaatttgtaatttgtgcaatgtttctgggcatgtggctagacagtgtccgaaagccaatgttcttggagatcgcaatggtggcggtggtggcggcggctgctcgtggtggtggcggtggtggctatagagatgttgtttgcaggaactgccagcaattaggtcacatgagtagggattgcatgggccccttgatgatttgccacaattgtggaggtcgtggtcacctggcatatgagtgcccttcgggtcggtttatggaccgctaccccaggaggtactgatgatgggaaatttatgcgttaccagttatatggatgtttttctatgatttctttgccgaggacagattagttgagttcttggtaagtgtatgtgtttggcttatattatttttaagcttttctagagtcagtgacaactgatgccacattcacccgcgcaaatntatagtgttatgatatacagtgcaaaatgctaggaanaaaaaaanaaaaaaaaaggcgcggccgccgacnntagtgag

SEQ ID NO: 29862 - DNA, 871 bp, Glycine max
  Clone ID: TF_GmC55382_1
caacgatagtaaaagcagaaaaggtaaactttgcttctaaatctagagttaatttggagttgatttttaacgaactcagggctgagaaatcgaaaggtatcaccattcccaactctgtaaccaataatactagactggggagcgttgaaactggacaagttacaccaccagcttattataagagcaatgctaataccagtagagattttgggatgccggcaaatcaagtgggtcaacagcatggaaaccaatatagcaatatttcttctgcaggtgctgctcctggttcatatacatcatgcaccaactgtggagtctctggtcatagctctgcactttgcccaaatattagaaatgtacctggacattctgcaggagggggctttgccaacagggcatctgcgggattaggtggtggtggtggtgcttctgtcgaatgctataaatgtcatcaaagtggtcattatgcaagagattgtcctggtttcagtgcagcacctccatcatcatatgggagcaattcaggtggtggtggttctggcgaatgctttaaatgccatcaaactggccactgggcaagagactgtcctggtctcagtgcagcaccttcatcatatggaagcgctaatgcaatgcagggaagatatggggttgctcaaaagcaacaatttggaggatattgaaatttgttggagttcgttttcattttgtttcaagtattttatcatgtctttgaatatataagcaattttcgtcttaactgttaacttctgtatatacaggaagtgattatgtggtactgaatgctacgtttctttatgcaaacaccgtgcgacgtgcaaaatcatataccagtatatcttttatttcc

SEQ ID NO: 29863 - DNA, 1584 bp, Glycine max
  Clone ID: TF_GmC174_1
gtggcttctagtatttgctttgaggaattcagttgtacatgatggaatgatttctgtgttactttcttggcgggttcattacaactggggggcgggattttaatgatcctcgacatgctgatgatgcaagatataacctggatggtcgggatcccacgcgtccgtacggttgcgagggtagaagagatcgagccgagaccgctcgcactttgaaagggttcacgaagaaacaccaatccactccgagctgtatgttttcaagagctagaagaaatcaacgatgccctcgctatgatgataaatatggtaatacccgcctctatgttggaccgcttgtcttcgaggactcgttcccgtgacctggagcgtgtcttcagcagatatggaagagttcgaggcgtagatatgaagaatgatttcgcctttgttgaatttagtgatccttcgagatgctgatgatgctagatacaacctggatggtcgtgatgttgaaggaagtcgtattattgtggaatttgccaaggggggtcctcgtggttcccgggaccgggaatatatgggtcggggtccacctcctggatctgggcgatgctttaactgtggcattgatggtcattgggcccgagattgcaaagccggggattggaagaacaagtgttaccgttgtggggaaagaggacatatagaaaagaactgtaagaacaggccgaaaaagttgagccaacgtggaacgagtctttcacgttcaccagtaaggtcacgttctcctacgtcgtggaagaagcaagggatcgaagctacagtcgagaccacagcgacagccgagcgcgatctcctgtcagatgagaacgaagcccaagtttctgaagatagatcacagagtcgtgagccctccaagataaggaagcatagtgcatcacctgaccaaagcagcccacggaagagaggtgacacatctcctggcaatgataggttggccactccatcaagatgggtctgactacagtgatggtcctagagggaaaagtagaagccctgctagccctgcaagggaccgtgatgagggtggctatgatagccctaaagctaatggacatagccgcagccccagccggagccctagggatgatgacaggagccccattgatgaagatgataacaaccaccgtcgctcacagtcactttgaaaacagcacttcctgataaaatgagattcctgtgggtgaagcaccaagtatgacgaacggagaatattgagtgcatgtgtttgttacaaatgttgctaaaattcacattaaaaagaactcttgttaaaaatataagttcaggatgtgacccaatttgtatctgcctttgtttataaaatgcactccagcttaattatgtgacaattgtttctgaaaacagttttatgtatcctatttttcagattcttgctggtcaagcagcatgtatggcttacctagaatatggagtgcatgaatttgtttcaaatgttggcataatttaaatcaatatgaactattgtgagaaaaaaaaaaaaaaaaaaaaaaaaaaaaaaaaaaaaaaaaaaaaaaaaaaaaa

SEQ ID NO: 29864 - DNA, 549 bp, Glycine max
  Clone ID: TF_LIB4367-017-R1-N1-F11
gggttttggtgtcactttattggcttgttcctgacattttgaacaggaatttagcgatcctcgggatgctgatgatgctagatatagcttggatggtcgtgatgttgaaggaagtcgtatcattgtggaatttgccaaggggggtcctcgtggttcccgggaaaacttgggtcggggtctacctcctggatctggacgatgctttaactgtggcattgatggtcattgggcccgagattgcaaagctggggattggaagaacaagtgttaccgttgtggggaaagaggtcatatagaaaagaactgtaagaacagtcccaaaaagtcgagccgacatggacggagtctttcacgttcaccggtccggtcacattctcctcgtcgtggcagaagccgggatcgaagctacagccgagaccgcaactacagccgatcgagatctccagtcagaagagaacgaagcccagtttctgaagatagatcacagagtcctgagccctccaagataaggaagcatagcacatcacctgatcaaagcagccccacgga

SEQ ID NO: 29865 - DNA, 221 bp, Glycine max
  Clone ID: TF_LIB3242-590-P1-J1-B7
ctacaacagtggagaatcgggacatctttctagggattgcagaggaggcggaggtggggacaggtacggaggaggtggtggtggtggcacatatggaagccgccgaggcgggaggtacagtggtggaagaagcagccgctgccgcagaagaaactgctacagacgtggagagactgggcattttgccagagattgcccatcaagtgctcgcagaatttact

SEQ ID NO: 29866 - DNA, 1938 bp, Glycine max
  Clone ID: TF_GmC2715_1
aaaatcggcactcatgagttattattagggtttgcaacctttaaactctgaagctgcaatagcacagcacagaatggggcgcaaagagaagcagaacgcgaaggcaatagatgaggaacacgacgtagtaaattttaacggcgcttcaacgccgtccctcgttttcagcagcgacgacgatgaagccaaccaagatctcagcctcaagatcgtcgaaaaggccatgcgaatgcgcgccgccaaacacgccccaaacgacgacgtttcttctccgttttcgcagaaatccgaactcgcagtgcccctaaacgacgtcgtttcggatttgcccagcgcaatcgctgattccgaagtgacggaaaagaagaaaacggccaagttgaagagggaggcggctggggatcaaagtgttgttatagcggaggagcaagagatggaggagacaagcaatgctacagagaatcacgagtttgtggaaggaagcccggttctgataggccacaatatggttctgcgaaagctgcttcggggtccaaggtattttgatccaccggatagtagttggggagcatgtttcaattgtggtgaggatggtcatgctgctgtgaactgttcagcagcgaagcggaagaaaccatgctatgtttgtggtggtttgggacacaatgcaagacaatgcactaaggcgcaagattgctttatctgcaagaaaggtggtcaccgtgctaaagactgtctggagaagcacacaagtagatcaaaaagtgttgctatttgcttaaagtgtggaaattctgggcatgatatgttttcatgcaggaatgattattcaccagatgatctcaaggaaattcaatgttatgtctgcaagagagttggccatttatgctgtgtcaatactgatgatgcaacaccaggagaaatttcttgttacaaatgtggtcagctgggtgaagctgacagaaggggttcaaggttgcgggatgagattacaagtggagccacacccagttcatgcttcaaatgtggtgaagaaggacattttgcccgggggtgcacaagttctatcaagtcagggaagaggaattgggaatcatcacacacaaaagataaaagatcccaaaaagaaaatgattacatgggaaatagatctgcatctaatgatatggttggggctcgcagaaagaaacgttcacctaccgaagaaagaggcttttcaactcccaagaaatcaaagagtagaggtggttggacggcggagtatcctaccgaagaaagaggctttacaactccaaagaaatccaaaagtagaggtggctggacaacagagcatcctactgaagaaagaggctttaccactccaaagaaatccaagaatagaggtggctggacatcagagcatcctttggaacaaaaagactacacaactcccaagaaatccaagagtagaggtggatggatgtcagagcatcctgaagaattctttcctcccatgtcctcaaggagcaatggttataggtctctagggacaccatcttctagaaacaataaaattcattcatttggtggtggaagtcacactccaagttataaatcttccaaggtatggaatgatcatgcaggaacttcaatgtctcaaggatcagccaggtcaaatcatcatagattttcagcatcaaggtttggcaactctagtagtgacggacatggtagaaattacaactggtggtagcgatcatgtatatgctgacattatgttctctatatttccttttgttaacttgtaaaacagcacctgcaagttttctaaattaatatttaatttttcctttcagatatctattcaatgatactgtcgtaattctttcaaatttatggatctgttttaagggtatccaaattccctgttgaacttccgaaaaaaaaaaacttcaaaaa

SEQ ID NO: 29867 - DNA, 388 bp, Glycine max
  unsure (1)..(388): unsure at all n locations
  Clone ID: TF_jC-gmXLIB3563P014ag08a2
gggaggggggaaagcagcgaagggcattttnnngntncgcggggaacaggaatcgcggcgcgtgaatgtcgccggcaattaaacgctctttctactcttctggccttgtcaatgcgcatataacataggaaaagaaaaagaaaaatgcccacagagagagagaaaagaaaagaacgaaaaaccaagaagcggcgaaacgatcgtgagagatgaacaagggcgaactgagcaaaggcccggggaggatcctacgcgaggcggaccaggcgagcttatgctgggaccgcgacgctaaggcgcacagggccaacttcgtgggcgcgagacacgcgcgaaccttactgcggcggacgtgccgctcgcccacgccgcggaaggccgccggcgc

SEQ ID NO: 29868 - DNA, 480 bp, Glycine max
  Clone ID: TF_LIB3242-138-Q1-J1-C10
caaaacaagtggaatcacaaatttctttctccatctttaatgaccaaattgacctttaggcaagattggtaaaagacaaatggactaaaatacagacacgtgtgattacgtgaagaagtggcaccccatgtccttgtctagtagaactcgtccatagaatgatcactttgttataaaaaggctttatattcttatattcatctacaccaagctacaccatttgttcaagaaactaccaagtagcaagcttgattattattattattattatcattatcccattgagcttctaaaaatgtgcaaaggtgcagaaggagaaaagcaacatggtttctgcagcagctatctacataaagaatgtgcaaccagaagtgctacatgttgtgagctatgtgggttacaggcttcattgtattgtcaagctgatgatgcatacttgtgtagaaaatgtgataaaagggttcatgaagctaatttttt

SEQ ID NO: 29869 - DNA, 272 bp, Glycine max
  Clone ID: TF_LIB3056-003-Q1-N1-G10
attagaccagtgaatgcaaagtgatgttccgagaattaccatacaggaattgaaagaacgacgcttgaacggattcaggagcccctgtagcgtgccaggacaagccatgcgatcaatacaagctagcctcggcagttcttttcttacgacccaattccgcattactatgcatatcctgcgattccgacattcactgctcgaacaaactcatgtaccgccacgatcccgtgtcgatgtgtgagacgtgcgagcctgcacccattgatgtcacg

SEQ ID NO: 29870 - DNA, 431 bp, Glycine max
  Clone ID: TF_jC-gmle01810044g07a1
ctttggctagtcaaaagatggaaggagaagctactatggctacgagggctaacatgtgcgacacgagcagtctggtccgctaattcgtgacgtgtggtgcgcatactgacttactctgcgcaaagtgcgacgctcgcatacacccctcgctgacccagaagcatcgcaagcgagcgctcaaggccggctaacgcgcagctgcagtgttcctatgcgaggttgacgctgactgggtatgcgcctcctgggacaacgcatccacgcagacacacgctctgcaacggaacaatggtgatcagattgatatgaatgcagcttgctcctggatcgacgtctacgagctcgcatacaatgctgacttggacgacgactactgaaccgcttgatggctcttgctcaaccctgtcacaagcgctaatgtccctaacaac

SEQ ID NO: 29871 - DNA, 328 bp, Glycine max
  unsure (1)..(328): unsure at all n locations
  Clone ID: TF_7591390
aaagattcagtacagcgtatacaaagccacaaaagccaaagttctatactgcaccaacgaagcagcactatactgagaatgcgacaagaaagttcacacagcaaacaagctcaccagcaagcaccagaagatccctctctctctctccgcctctcacatacccaagtataacatatagccaaaaataattaattatttcttctatttagagaatcaagctttactatatagaaattataatatatctatacatacancaaatacctatatctctaatcatcaggaatggttacttactagtatgagagtgaaccttaaagctactgag

SEQ ID NO: 29872 - DNA, 412 bp, Glycine max
  Clone ID: TF_GmC24129_6
cccacgcgtccggcgagaagacgacagtatggggacacaccatttgcattattcttctcttcttttcttttcatatctgatctacatttatctatattctcttctcttctctctcaaccttctcaacagtcttattagcagagagcacaagagaggacagggaaaacagaaaaaaaaaaattcggcttctgcatcttcagataagaagggggaacttctctattttttgcggcatatcgtggtttgtaaagactgtttctaggtggagattcattaattgacactgaggtgcaagagaaaagtgagtctaaagatgggttatatatgtgatttttgtggagaccagagatccatggtgtactgccgctctgacgctgcatgcttatgtttgtcttgtgatcggaattgtcat

SEQ ID NO: 29873 - DNA, 469 bp, Glycine max
  Clone ID: TF_jC-gmXLIB3563P061ad12d2
cggcccgccggtttggtttgggggtttttttgaatgaaaatttactgtaacgagtgttaggcttgttgagccacagttcttgtgttgatgctaacgaggctgctctgtgttgggagtgtgatgagaaggatcatgctgataacaaacttgcctttaaacaccaaagagtggctgtttctatctcttggtatcatttgcccgaatgggacattggtcaggaaccctttagctattttttttgcctacaagaacgggctctgctctgcatcaaaatgtgattgtggccttacacactggaaaagcttttgtctctcgacatcaaaaggttcttttcactggtgtaagagtttgccttgaagctatagaacctggggcttccttaacttctttgacgacaaattctggggagagagtttcagatgcaaaaaattcttctgtctgtagaaaggttttcactgtgccccaacca

SEQ ID NO: 29874 - DNA, 221 bp, Glycine max
  Clone ID: TF_jC-gmst02400049f05a1
ggctcgagaacaaataccagggagccaccaaccatggctttcaagctctgtgacacatgcagatgggacactgataccttgttctggcggcccgacgcggtctttctctggggggcctgtgactttaaggttcatgccgccaacaagctcgcatcgcgccacccacacgttttgctctgtgaggtgtgcaaacaggcgcccacgcatgtgatctggaaagc

SEQ ID NO: 29875 - DNA, 1229 bp, Glycine max
  Clone ID: TF_GmC998_1
tttggtcacagcatactccactctctctacctcagagacttattaagatgaagcccaagacttgcgagctttgtcatcaactagcttctctctattgtccctccgattccgcatttctctgcttccactgcgacgccgccgtccacgccgccaacttcctcgtagctcgccacctccgccgcctcctctgctccaaatgcaaccgtttcgccgcaattcacatctccggtgctatatcccgccacctctcctccacctgcacctcttgctccctggagattccttccgccgactccgattctctcccttcctcttctacctgcgtctccagttccgagtcttgctctacgaatcagattaaggcggagaagaagaggaggaggaggaggaggagtttctcgagttcctccgtgaccgacgacgcatctccggcggcgaagaagcggcggagaaatggcggatcggtggcggaggtgtttgagaaatggagcagagagatagggttagggttaggggtgaacggaaatcgcgtggcgtcgaacgctctgagtgtgtgcctcggaaagtggaggtcgcttccgttcagggtggctgctgcgacgtcgttttggttggggctgagattttgtggggacagaggcctcgccacgtgtcagaatctggcgaggttggaggcaatatctggagtgccagcaaagctgattctgggcgcacatgccaacctcgcacgtgtcttcacgcaccgccgcgaattgcaggaaggatggggcgagtcctagctgatgatagctataccaatgcattgtaatgtatgtgtaatccaaatgtgtggatttcaaatttgagtttagtttcctttgcttttcttttcttttttgtatctacgaatggttgttgattaatgtgtagcaattggatcaacaaattcgaatataaatgaaaaactagccagccaagcaactcattctaaatgtgcttaatagacacgcgtgtcgtggtctctcaaaaaaaaaaaaaaactcgagttttttttttttttttttaaaataaaaataaaaaaaactatatcaattaaagcttattttcaatcttacactcattttcccccgaaattgaaaaaaagcaaaaactaatagctagtgaagccacattccacggaactattaattgatggaaatgagcttattcaatatgaattgaagacacagctgatgtgattccattggttc

SEQ ID NO: 29876 - DNA, 1310 bp, Glycine max
  Clone ID: TF_GmC24129_2
tctatctcttgaaaccacgcgtccgctcaacacaacacaatacaacagtcttattagcagagcacaagaggaggagagagaaaaccaaaaaagcaagagagagaaagagaaatcaggcgtttccgcccacagttgtcctgccgtctttcttggctgtgcgcccccttcaatccctctcttgcgcgatcctcctgggctcgctccttggcctgtgttttccctgcttcccgccagccgctgtattgccggcatgcggttcctggtttcgttgtcgcctcggctgttggcctctatggtgtggggcagaattcggcttctgcatcttcagataagaagggggaacattctctattttttacgggcttattgtggtttgtaaagactgttactaggtggagattccttaatttacactaaggggcaagagaaaagtgagtctaaagatgggctatatatgtgatttatgtggagaccagagatccatggtgtactgccgctctgatgctgcatgcttatgtttgtcttgtgatcggaatgttcattctgctaatgccctctctaggaaaatggtgtttggattgcctttctatagatgcttggcactttctgctgcataattcttttccaagaatttaaaaagccttctaagttctttgaccttaaccatacttccatgtctgtgatgtggtcatgtaaactccccctctgctaaatagtctcctactctaatgcctgagatggcatgataattggcttacttttaacagttccagataaactacgaaggttgtaaattgtaatatttggctttgacatgtatagcacacagtctacatatataattttacccaactcttttatgtaatcagacaaaaattgtaaattcaatctctcatgtatagaataggatactatgcatgttgatggtagtctatatatatattggacatggaccgatacaagtttgtattctggaccagccagctagacctgccaatgaatgtctttcaaagttatactgtcctgctacaaaattccccgcattatgtgaaaatgataatctgtatgatgatttcaacatggatgaagtggatctaaatcttgtgaactatgaagaactttttggtatggccctcagtcattctgaagagctatttgaaaatggtggaattgatagcttgtttgggacaaaagacatgtctgctggagatttcagttgtgaggatgctattgctgctgaggctgtttgcattggaatgtgattcctgggctacactgctgtaatatgaatgcattgcgttattcatata

SEQ ID NO: 29877 - DNA, 1485 bp, Glycine max
  Clone ID: TF_GmC12_1
tttttaatatcaaattttaaaaaaacatattagtaaaattaaacaatattctatctgatttttataagaaacgaatatcaaatacattatttaatcaggaagatattagttgagttggatagtaaaaaataaaataaaattatagatttaattttcttattaataaattaacatttatttataaactaaaaataaaaattatgagctttgactaagagctaatagtagattaattgtataataaatttattgacagataacaatctaaatcaataaattttaattttaaaaattatttctctcctttactatcaagtatttttcaactttgcattcgtctggttgtggaatccttcttaatagtactgttttagaattgctaagatgaagtcaagttttgaggaattgaagaagaagaagaagaagaagggagaaggagagcattggaagacatagagataaagaattgaagataatgcgaaccctttgcgacgtatgcgagagcgccgctgccattgtcttctgcgccgctgatgaggctgctctctgctccgcttgtgaccacaagatccatatgtgtaacaaacttgctagtagacacgttcgggttggccttgctgaccccactgatgttccacgctgtgacatatgtgaaaacgcacctggtactgaatgctttcttttactgtgagatagatggtagttcgctgtgtctgcaatgtgatatgattgtgcatgttggtggtaaaagaactcatggaagatatcttctattgaggcaaagagctcagtttccatgtgataaacctgcccaaatggaagaactagggctgcaacctatggatcaaaatgaatcaaggagggatgaaagtcagtcactcaagctaaaaataagagatagtcagcagaatcacagtgtctcacctgttccaagacaagaaaataatattgatggtcatggaaaaatggataaaaagttaattgatcttaatacgaggccactgcggttaaatggagcagcaccaaacaaccaggaacgaggtatggatattttaagaggcaataatcataaatctgcgagtgtgccaccagtagaatccttcaaacaagagtctgagaagtaataaagctacaacatatagggtgtggtcagaggctacagaaatattatgtttacgcaaatttctcttacactgctgaccttgtttatgtgaatcttgttttttgtctgcttaaaagtttagttgtttggctgcagaccaaattaatgagggaaaatagttgctttcatatggatgagctgcataaacaaggttactacagcttaaactcgagggtataacatgattgttgccagtatacaccacgttccttaaagcagcttatgtccgatgcatccttaatattttggttttcctagtctgacagcagaggacctcttggttcttatacaaactttatgatattttattacatgtctaaaaa

SEQ ID NO: 29878 - DNA, 1464 bp, Glycine max
  Clone ID: TF_GmC117_1
ccgcggaataacccatcaaaacaatcattcccctgttaccaaaaccacactgtaacccccctttttttggtattggcttcaaatgagttcggctactaagaacgcggcaaacgcggttggggccaaaacggcaagagcatgtgacagctgcataaccaaacgtgcacgttggtactgtgctgccgatgatgcttttctctgccaggcctgcgactcttctgttcactcggcgaatcctttggctcgaagacacgaacgagtccgcttgaaaacggcgtcctacaagtccactgatgaacaacaacaacaacaacaacaacaacctcccacgtggcacactaagaaacctcgaacgccgaggcaccggaaacattctcgtaacaacaaccctttccatttggtccctgaagagggttcggaggaggcgaattcccatgatgagaacgaggagcagcttctttatagggtccccatattcgacccttttgttgctgagctatgtgggactaatagttctccttctcctgttacttcaactgatcaaggggtagttgctgctgctgaggttgaatacaaagggattcaaagcaatggtttttgtagcaatagcaatgagatggaaaacttgcatgggatgcttccttctgatgcagaacttgctgagttcgctgctgatgtggagagcttgttgggtagggggcttgaaaacaagtgcgtggggatggaagaattgggactggttgatgcgaaagaggaggagtgttcggtaggtagtgggaaggtgaagatggaagatcaggaagagagccctctggtggagatggagatggatatggtcgtgggaagagatgatcaatcgtttgagttgagctttgattatgaaacgtgtgaagaggtgaaggtttgtgatttgggattggggaatgaattaggagcgaagaaagagaatgatgatgaggtgaaaaagaacaagatttcgttgcagctagactatgaggcggtaatcatcgcctgggctagccaaaaatctccgtggaccaccgctgacaaaccaaacttggaccctgatgagtgctggaaacaatgcatgggaagttgcgaaacggcatatcatcatccttgcggtgaaatgggtggatttgggattcatccagtgataatagacgggggcagagaggcgagggtgtcaagatacagagagaagcgccgaacgaggttgttctcgaagaaaataaggtacgaagttaggaaattgaatgctgagaagagacccagaatgaaggggaggtttgtcaagagggcttcctttgcaccaccaacatttcctttgctaaataaataagagctacatttgttgttctgccactaaagttttgttagtatttgctaagtatagttttgcgacgtgatatcgcttttcatttcattttcttatttctttgtatataaaaattttgctaagtt

SEQ ID NO: 29879 - DNA, 2442 bp, Glycine max
  Clone ID: TF_GmC5877_1
gggaatttagaatgcttagaataaatgaatgaataaagttgagttccctctaacagttattttagagtttagttgagttatcatgaataatcatcagtgacactgtaggagcatggatcctctatgtgagttttgtcgggtggtgagagctgtggtttactgtaagtcagattctgctcgtctctgcttgcattgcgatggctgtgtacactctgcaaattctttgtctcgcaggcattcgcgttccctcctatgcgataagtgcaattcccagccggcaatgatccgctgcatgaatcataagttgtcattatgtcaaggttgtgactggaatccaaatgactgttctgcattgggacataggcgccttgcattgaattgctacactggttgcccctctttggctgagttttctaggctctggtcttttgtgtttgatgctaattcctcacttggtggttgggaatcggttggtactttgccaaaaagtgagagctgcactagccagtgtttggagcaaactgatcataatggtggttattttggtttggtgagtgacaagttggatgaaattgaatcttgtgtcagatatcaacctcggatggatcagtctcaaatcattccatcaaatccaaattacacaccgtactgcaaagacgaagcatttttctttcctcaagactcaaaccagccaaagctgcaggaatgtcctaatctaggaattcatgatgggaatgaactttgtgaaggtttcaatgtggataacgttcaattaaactttgaaattgctgatgaaatattttactgttcacaagttgccacaagataccaccttgaagatggaggaatggactgtttattgatggataaaaacatagcagttacagaatctagttcacttattgagagtgccatggaggcatcatcatctatccaacaagattgtgtggcttttcaatcatcgagggctggtgggtcagctagtgtgatgcaggttatcaacagcaataccaattgtgcacttatgaatcctagctgcactaaaaacatcagtctgggatttcctcagggcctagttcattcaaacatgccacttcaatttcccaacatagttggtgaaaataattctactgaatatcaagactgcgggttatcgcgagtgggtgaatccccctgggaatcaaatttggagggtacatgcccacaagcaagggataaagctaaaatgagatacaatgagaaaaagaaaactcgaacctttggtaagcaaataagatatgcttctcgcaaagcaagggccgatacaagaaaacgtgtgaaaggtagatttgttaaagcaggtgaagcatatgattatgaccctcttgggacaagggacatctaagcatattatctacaataactatcttttccatgaaagatattcttctgactggtaaggtggtccctggaccttgtgagtacattgctttgttgccaattcttcatcaacagacgttttgtttatcttgtgaaagtgggagagttataatgcagctagatatttattcaaaacttgactgcttaggtgattgatacagatctattagagattttaacatatttagaagataacaaagatatgaaggtgttgcaattgggaattgcagaggaagggattggatgtatgccaagataatgcgtttaattatacataggaagtgtgagaggtaacaggcatgggacatagaggagcagaacatttgaacagatttcaaacagcatcacagtcattgtcaattcagacaaaaacagagggcctggatattcctccttgcatttagaggagatgtgcagagtgatccatcctgaatttcaaatgtgatattgtgagtctctgagcctatgtgttctatataaataaacactgcctagtgtaatgaataaaagagaaactggtgtttggcaagcaacaatagccaacctcacactttctgctttcagtttggtccttccgtcctcatggggatccttcacacgaccttattctgtcatcttaagccattgttcaaggacagcaacaccatattttggaacctcttcatttattccattttcatcagattagtgagcacgatcgactgttgattgagatactattgttcttgacttgctggaagccagttttacctgccgcaactattggcatctttgacattgcctcaactatttcatttgttgtattcctctatatttgctttgaggatggcacctatttcttcaataattgtacaaacattgtgtacaaactttcctgatttcaagggacgtttgtttctcctatgaaataggagatattaatgactgttttattgttttgtaatttgcacaaatctgttattattcattaaatttctgtagaatgttgataagaaagaaactacagtctttactgttccgagt

SEQ ID NO: 29880 - DNA, 1818 bp, Glycine max
  Clone ID: TF_GmC906_1
gcataaccaataattgaatttgaatcatttgggtctctagacacaaacactaccccctctttccccctcctcaacattgttatgatcccttgttggtaaccattccatttgcacttgtctttgcaaccaaaaaacaagctctatgaccaacgaaatgaaagaagcaagtgccttaggagctagaacagcacgagcatgcgagagctgcctaaaagtaagagcacggtggtttttgtgcagcggatgatgcattccttcaccatggctgtgacaacatggttaactcagcaaaccaattagtaggtggccagaaaaggttaaagctccaaactccttcttccatgtgcaacaataccttgacccctaagttggttggcctaattgtatgagaacaaagtctaaaatctccttacagtatcaaagccgatctccgtcatttgtaacaaaaggagaaagcgtctgtttagacctaacatgacgatctcaaaagcgagcttttaattacaatattagtcatcgtccccttgtgcctgagcttggaaaagaagagccaatgcttaatgatgagactgaggagcaactacagtgtcgcgtgccgttgtttgatgctgggttcagtagaatatacaatgaagtgaaagactaggttgtagctttttgtgaagaagccttggacttggaaaacttttcttccgagtttcttccatcagatacggaccttgctgagtttactgctgatgtgaaaagctttcttggaaacggggctgatgaggattcacctgatgatgatgagcacgtgaaagaatcagaactactgattcttgattgcaaagaagaagaaggagatgaggaaatggatgaatgttttgatgtagtactaattgaagccaaagaaggaatggtgaaggtcaaagatgaagaaaaacttgatgctgatgatgacacagcttgccatttggattcgattcttgatatgaacggcgaggcatttaattggaatattgttgaatcagaatcacctgcacaggcacaagaagatgaagtgagtaaagtgggaactaagaaggacatatttttgagattaaactatgaagaagtcattactgcttgggcaagtcaaggttctccatggactaatgggaccccacctaagttcttcaactctgatgattgctggctagacttcttgggttcgaatggtgggaatgttcaatgctgttatggggcagtgggaagcttaagggtgcatgcagatgggggaagggaagcaagagtgtcaaggtaccgagagaagagaagaacgcgtttatttgcaaagaagataaggtatgaagtgaggaagttgaacgcggagaaaagacctagaatgaaaggtcgatttgtgaagaggacaccctttgttggagccactgcgttgccagcttaatcatcaatcaccactgacatgattgatcatcaaagtgatcaaataaatggttaacttctccaagttaatttgattttatggaaaagttaatttttagattaattattagttacttggttttgccatatatgtacaatatcatcactaggtcaggtttctcttgcttgggatatttatttctttctctaacaggtctagctagtactaatggaaatgtggtagcccctctcagcattttgaaggctttggtaatcaatttcgggagccctttttcaatgttgcttaattatgatatatataagaatctgtaattaatctatgctgatgttatgtttacctttaactctgagggtactgattaacagtgtttaacatcaggtacttatatgtcc

SEQ ID NO: 29881 - DNA, 441 bp, Glycine max
  unsure (1)..(441): unsure at all n locations
  Clone ID: TF_uC-gmflminsoy034d11b1
aactatcatacccacatggatggnggggaacatctgggttcttggtggcctctttcaatctaaaattatctttatttttttattcacatcatcattataacatatagtgtatattatgggtctgtatctgactttaactttctttgtgtgtattggatgaagcaatgaaagtgagagaggccaattatgcgaacgctttgtgatgcttgtgagagcgccgggggtatagttttctgcgccgctgatgaggctgcactttgtcgtgcctgtgatgagaagggtcacatgtgcaacaagctagctagtaggcatgtgagggttggtgcttgtaggccaagtgatgtaccacggtgtgacatatgtgagaatgcacctgctttcttctattgggagacagatggaagctccttttggttgcagtgtgatatgattggtcatggt

SEQ ID NO: 29882 - DNA, 672 bp, Glycine max
  Clone ID: TF_GmC6837_2
atattgaagaaaattctgcagctgaagggcagccagagtagcaattgattgatgccttcttgtgtgtcgaagaaagatggtgaggtcccattgacccaacccaatcacagttctgacaaagtgaaatctttctcatcaacacactctcacaaatgcaggttgcgaattgcatctctcgcatacaagggttctcgaatgacgcctagaaagggcattagcagaatgaacatttcgatcacacgacaaacataagcacgcagcatcagagcggcagtacaccagggacctctggtctccacaaaaatcacataagtaacccatctttaaactgcctctacttttgctcctgaataagctgttggacaatatgatgaaggaagctttagttcagttctgcaaattcagctgcatacggcaagaaatacagagagaggacaagatcggtaaggaaaaggggtctgttgcttttttcagaaaaactataaaaataatatttttaagcaaaaattgaaagcaaaggaaccctagagaggtggtggagaaagctggacttttcagaagaacaaacacagaccctttgtgttttgtgttgtgtgtgtgactgtgtatctctctcgacgcgtggggctctcccgggagattccgggacccggtagcctgcagggcgtacca

SEQ ID NO: 29883 - DNA, 626 bp, Glycine max
  Clone ID: TF_GmC117_2
atgagttcggctactaagaacgcagcaaacgcggttgggggaaaaactgcaagagcatgtgacggctgcataacgaaacgtgcacgttggtactgtgctgccgatgatgcttttctctgccaggcttgtgactcttcggttcacttggcgaatcctttggctcgaagacacgaacgagtccgcttgaaaaccgcgtcgtacaagtccaccgatgaacgacgacaacctcccacgtggcacaccaagaaacctcgaacgcccagacatgggaaacattctcgtaacaacaaccctttccacttggtccctgaagagggttccgaagaggcgaattcccatgatgagaatgaggagcagctcgtttatagggtccccatagtcgacccttttgttgctgagctatgtgggactaatagttctccttcttctgttacttcaactgatcaaggggtagtagctgctgctgctgctgcttctgctgaggttgaatacaaagggattcaaagcaatgatttttgtagcaatagcaatgagatcgaaaacttgcatgggatgctttcttcggatgcagaacttgctgagtttgctgctgatgttgagagcttttgggtaagggggcttgaaaa

SEQ ID NO: 29884 - DNA, 1247 bp, Glycine max
  Clone ID: TF_GmC264_1
cgttgtttgagaatgcagcgcaaagcaggtggtaaattccatctaaagctaaatattggtgcgacacgcccattcaaccataccgtaccagcagaggaaagagagaaaatttcagaacaaaaaagaagcagaggaaaagagagatagagagagaagaaaagctgtgaagagaagagtctgaaatctgaatcataaataattggtttttgagatgaagaactgcgagttgtgcaagcttccggctcggactttctgcgagtcggaccaggctagcttatgctgggactgcgacgccaaggttcatggagccaacttcctcgtggaaagacacacgcgcacgctcctctgccacgcgtgccagtcgcccacgccgtggaaggcctccggcgccgccctcggaaacaccgtctcgctgtgcgagagatgcgccggcggaaccaccgaacaaggtcaagagagccaaggaggcaatgacgacgacatagacaccgacatagacaccgacgatgaggatgactacgatgagagcgaggacgaggttgccgccgacgaggaggacggagacaaccaggttgtcccttggtcctccgagccgccgccaccagccccgagctcttccagcagcgaagaatcggttagccggtgcaacaacgtggacgaggtttcgaccacattgaaacgccgtcgccaggaggacaatgattttcagggttggaattcgaataattggggatgtgaacggagcgaagtggagagaggaggttggttggttcggttgcggcggagaaccgccgatgatgtggcggttgagcaacggagtgctagagcggcgtctccagacggttgctgtggtgatagagcatctgaagacgtttgatctgaagggacacgaggaatctcaaccgcgtgatctacggggccgtaccattggatattatttatgggctctttgattattaactttctctaacgttacagcactcaggttttgataatggcaatcaagtgtatggatcgttttttttattattcctattattttttgttttgatattttgaggatcatggttgtgggggtgatgtaactctttacttctattttattgttgtaaaataacatttttttcttcttctgtttataagtaggtgaggatgctttatgttgtgatgaatacataggaaaaaccacgaagcaaatgaatgtgattccttattcatgataaaaaaaaaaaaaattatattcgttt

SEQ ID NO: 29885 - DNA, 172 bp, Glycine max
  Clone ID: TF_701038605H1
gtggcttttgagggaaaggagggaacttttagtgtgggagggtggaaactggaattgggtttggttgggggtaaagagaatgaagattcagtgtaacgtgtgtgaggctgcggaggccaaggttctgtgttgtgctgacgaggctgcgctgtgttgggagtgtgatgagaag

SEQ ID NO: 29886 - DNA, 1050 bp, Glycine max
  Clone ID: TF_GmC903_1
ggggcgagatttattttagtgccgcgacagagacaacaaagagagtgagaaactaaaaagagaagaggaaaaaaaaatggaggaatcatcaacaacatgcgtgttgtgcgagaagagggcaatgatgctctgcgactcggaccaggctaagctatgctgggaatgcgacgagaaagtccacagcgccaatttcttggtcgcgaaacattctagggttcttttatgtcgtttgtgtcactccccgactccgtggaaggcttcggggatgaaactcacgcccactgtgtcgttttgtaaccgctgcgttgcggaacggaacgcgaggtggaaccgattggtgaataatgaaaatgaacatcaacaacagcaacaacaacaacaacagagtgattttgtggtggatgatggtagggaatatggttctgatcatgtttttgatgatgacgatggtgattatagtgatgatagtggtgaagaagaagaagaggacgaggatgatgaagaggagaatgagaatcaagtggttccaatgtcttctggttctgccacgtcaccacctaaggttgcctgtttagcgttgaagcgattgagaaacaactcttttctgtcgattcttcacatgatgagacagcgtgctcttcatctgagatgcttagttctacattgcctagtggtgatgaatcaccctctttgagtagtgtattaaagaggcatcgggttgattagtgaaaattgaagaggttagaggtggtgacggtttgtgttgatgaacccaatttgatcgaaaattaatctggaccgttgaattgataggacaacttctgtttatagggcaacttcagattatgtttagtgttaacttccatctttctcttgaaactacttagtttatagaacaacttagattcagaaaaaaaattgttttctttttgcattcaatttttgtagccaaccccattgataataactctgtagttcacatttcatgatatatatgtatgtggagaatgtatatacttcaaatcctactttcattaattttcgccacct

SEQ ID NO: 29887 - DNA, 242 bp, Glycine max
  Clone ID: TF_LIB3094-087-Q1-K1-A12
tttcctttgtcttggctgtgactccaaagttcacgcagccaacaagcttgcctctcgccatgctcgtgtttgggtttgtgaagtctgtgagcaagctccggctcatgtaacctgtaaggctgacgctgccgctctctgcctcacttgcgaccacgatattcactctgctaatccgctcgcacgtcgtcatgaacgtgttccagttacgcctttctacgacacattcaactctgacaactcac

SEQ ID NO: 29888 - DNA, 1515 bp, Glycine max
  Clone ID: TF_GmC271_1
aaacgaaaagccattgttacaagcatttcacacttaacatatcaaaaaaacaaaggtttctactttctacgatgagagacatgaaagacgcaggtgccttgggaggcaagacagcaagagcctgcgacagctgcgtaagcagaagagcaaggtggttctgtgcagctgatgatgctttcctctgccatggctgcgacactttggttcattccgcgaaccagttagcaagcaggcacgaaagggttcggcttcaaactgcttcctcaaaagtaaccaccacgcacgcatggcacagtggattcacacgcaaggcaagaaccccgcgtcacaacagcaagcactttgcgctgcaacagcgtctcaaagacgaagttctcttcaacaacaccagtgttcttcccctcgtgccggagctcggaggggaagaacaagaaccggtggttgtggataacgatgagacggaggagcagatgctgtgtcgggtgcccgtgttcgacccttttgatgtgagaaccgatgacttggatagtttttctgacatggatttcgctgagtttgctgctgatgttgaaagcctacttgagaaagaagacgatgaaataagtgcgtatgtgggaaggggaggggggaagaagaaattgatggtgatgtagcgtgttatcgttaaggatgaagaagaaattgatggtgatgtagcgtgttatctggaatcggtttttgatgatgcctttcattggaataacattgagtctgtgctgtcagatgcacgggaagagaaggagggtgtggtggcgtgtgatgtaggtgtcggtgatgaagaaggaggaacaaagagagacatatttttgagactaaactatgatgaggttattactgcttggtctagccaaggttcttctccatggacaacttcaaacccacctaagttcaactctgattatgacttctccttgggtttgagtggtgtaggtggggaagtaagaagcttaagagggcacctagatggtggaagagaagcaagagtgtcaaggtatagagagaagagaaggactcgtttgtttgcaaagaagataagatatgaagtaaggaagttgaacgcagagaaaaggcctagaatgaaaggtcgttttgtgaagaggacatgctttgttggagccaatgcttttcctgcttaccactgacatcaatcaattaacggatccatctttgctttttctgcaaatttgggttaatacttggtttggctatatatatgtacgtatatatagcctgtattatataaatactagtaaataatattactgggccaggttaattttactagaattgttgcttgggatatttctgtctatatatatctctagacaggtttagtaattagtactaattaatgatcatctttattggcaggtttaagccttttggaatcccttttcattgtttcttattagaaattcaattgttcaatgctgatgctgttatttgctagccagttgatatttcacgctgctgatt

SEQ ID NO: 29889 - DNA, 859 bp, Glycine max
  Clone ID: TF_GmC271_2
aaaaaactaaggtttctacctttctacgatgagagacatgaaagacgcaggtgccttgggaggcaagacagcaagagcctgcgacagctgcgtaagcagaagagcaaggtggttctgtgcagctgatgatgctttcctctgccatggctgcgacactttggttcattccgcgaaccagttagcaagcaggcacgaaagggttcggcttcaaactgcttcctcaaaagtaaccaccacgcacgcatggcacagtggattcacacgcaaggcaagaaccccgcgtcacaacagcaagcactttgcgctgcaacagcgtctcaaagacgaagttctcttcaacaagaaccggtggttgtggataacgatgagacggaggaacagatgctgtgtcgcgtgcccgtgttcgacccttttgatgtgagaaccgatgacttggatagcttttctgacatggatttttctgagtttgctgctgatgttgaaggccggcttgacaaagaagacgatgaaataagtgcgtatgtgggaggaggagagggagttcaaggtgtattggccaaggttaagggcgaagaagaaattgatggtgatgtagcgtgttatctggagtcagtttttgacatgatcagtgatgatgcctttcattggaataatattgagtctgtggtgtcagatgccccggaagagaaagggtgtgtggtgccatgtgaaggtggggttagggaacaaggaggaataaagggagacatatttttgagactaaactattaatgagggtattactgcttggtctaagcaaggttctttcccatggacaactttaaacccaccttaagttaactttgattatgactttttc

SEQ ID NO: 29890 - DNA, 690 bp, Glycine max
  Clone ID: TF_GmC226050_1
caacggaattcccggcgcgacccacgcgtccggaaatatcttttcctcctcgttgtccccactggtccatttcacaattgagattttgcgttcagcttcctcccatgcttatcaccattcaccattcaccaccatgttgccatgcgattactgccattccaaacccgccatactcttctgcagaccagattccgctaaactatgcttgctatgcgaccagcacgtgcacgccgccaacgccctctccctcaagcacgtgcgcttccagatttgcgactcctgcaagaccgacaccgctgtcctccgctgctccaccgacaacctcgtcctctgccaccactgcgatgttgaaacccacggtgctgccgcttcctcccaccaccaacgtcaccgcctccacggcctctccggctgcccctccgtcacggagatcgcctccgcgctgtgcctcgatttccgggcccaggatcccgtggtccccaccgccgcctccggcggtcgcgatgaggtgtacgagcaggtgctggaaatcgcgcggcagaggaacgacgacctcggcgccgaacaactcaagttcgacgaatcccccataaacgacgtcgttgttgttgacgagatgctgatgcagcaaacgccgttcacgtctttgctttatgtgccgaattccgaatctgaattccactcccgaaa

SEQ ID NO: 29891 - DNA, 1181 bp, Glycine max
  Clone ID: TF_GmC24129_3
gaaaacccacgtttttgttttctgtgtgtattttttttatatacaatttctgtattaattcaaagttaatgtttttctgagcatgggactttttatgggggatcaaggcaaagaaaaaattcggcttctgcatcttcagatagggagggggaacttctctatttttcacggcatattgtggtttgtaaagactgttactaggtggagattccttagtttacactaaggggcaagagaaaagtgagtctaaagatgggctatatatgtgatttctgtggagaccagagatccatggtgtactgccgctctgatgctgcatgcttatgtttgtcttgtgatcggaatgttcattctgctaatgccctttctaagcgtcattcacgcacccttttatgtgagagatgcaattcacaacctgcctttgtaaggtgtgttgaagagaaaatttcactttgtcagaattgtgattggttgggtcatggcacctctacatcttcttcaacacaggctcgagaagcaatcaattgctactctggctgcccttcagcggcagaactgtcttcgatatggtcatttgtgttagaaatcgctgccataagtgagtctacatgtgagcaagaactaggcttaatgagtattaatgagaacaagtgtgttggtgttcctccggaagaccagaatgtgtctggttcagatgaagttaccgatctacctgctttgaacaagtctttggttggtgcatctttgatgcctgaatcaagctccgaaccttgtattctggaccagccagctggacctaccaatgaatgtctgccaaagttatactgtcctgctacaaaatgccctgccttatctgaagatgataatctgtatgatgatttcaacatggatgaagtggatctagatcttgagaactatgaagaactttttggtatggccctcagtcattctgaggagctttttgaaaatggtggaattgatagcttgtttgggacaaaaggcatgtctgctggagattccaattgtcaggaagctattgctgctgaggtgctaaactctagctatcttttgtctgtgataatcatggctttttttactaatggagcatcacatgttatgttctgtatacttcatagatgatgttcttgtgtattcacaaatgtgcatttgttttctccttg

SEQ ID NO: 29892 - DNA, 651 bp, Glycine max
  Clone ID: TF_GmC723795_1
ccgcaccgcttcccggcctttcctttaccgtacggatgttgcagcatatctttgtctttcctgtgatgcaaaggtgcatttagcaaatgcagtgtccggccggcacctccggaacctcctgtgtaactcatgcggataccaccttgcttatgttctgtgtttggaacacaaaatataatttcatagcttttttcatgtttggaattgaagactaaggaaatggagaaggtttgtgaattctgcacagctttgaggccacttgtttactgtaaggctgatgcagcatatctttgtctatcctgtgattcataggtgcatttagcgtctgcagcgtctggccggcacctccggaacttctgtgtgccactcatgcggataccatcttgcttatgttctgtgtttggaacataaaatgttgatctgtcgtgactgtgatcaaaagttgcataacctttctttaccacataagaaacgagctatcagaagtttcatgggctgcccttctgctaaagactttgcagcactctgggggtttgaatcgaatgagattgaaaactattctgctcaggatcagtttggttcagtttcttgtgtttctgcagatttgaatgttgcacaagtttcaggaaagcctggcattcaaactgggat

SEQ ID NO: 29893 - DNA, 843 bp, Glycine max
  Clone ID: TF_GmC24129_4
caccatttgcattattcttctcttcttttcttttatatctgatctacatttatctatattctcttctcttctcgtccgaccttctcaacagtcttattagcagagagcacaagagaggacagggaaaacagaaaaaaaaagtaagagagagaaagagaaatctgggtgatttctgttgttctcttgaaagagttcagctgcttctactatttctacttctagggctttctttgttttgctttgcttaaaagttttgcataaaaataaataaatatttttctttttcttcttcttctgaaaaagcaaatcccttttgcttaccgatcttgttctcattgtcttccttgccgtgagaattcggcttctgcatcttcagataagaagggggaacttctctattttttgcggcatatcgtggtttgtaaagactgtttctaggtggagattcattaattgacactaaggtgcaagagaaaagtgagtctaaagatgggttatatatgtgatttttgtggagaccagagatccatggtgtactgccgctctgacgctgcatgcttatgtttgtcttgtgatcggaatgttcattctgctaatgccctttctaagcgtcattcacgcacccttttatgcgagagatgcaattcacaacctgcctttgtaaggtgtgttgaagagaagatttcactttgtcagaattgcgactggttgggtcatggcacctctacatcttcttcacacataagagacaagcaatcaattgctactctggctgcccttcagcggcagaactgtcttcgatatggtcattttgtgttagaaatcgctgccataagtgagtct

SEQ ID NO: 29894 - DNA, 1415 bp, Glycine max
  Clone ID: TF_GmC38808_1
ggtgggcccgcgcggccctcgagtcttgccaacacttccttccttacttactttatgtcttgtccaaaacaccacacattaactccccgaatgttggagggccaagcaacaatgcgcacgtgggcgcgcatgtgcgacacgtgccgttcggtcccctccaccgtgttctgccgctcccacaccgcctttctctgcgccacgtgcgacactcgcctccacgtctctctcacgtggcacgagcgcgtgtgggtgtgcgaggcctgcgagcgcgccccggcggcgttcctctgcaaggccgacgccgtctgcctctgcgcctactgcgacgccgacatccacgcctgcaaccccctcgccagctcccaccaccccgtccccatcctccccatccacgcccgccacaacaacaacaacgacgacgacgacgttgctgacgtcgacgacgaagacgaaaccgcttcatggctcttgctcaaccctatcaagagtgctactgtccctaacaccaataaccataacaataataacgggttcttgtataacgaagaggttgatgagtatttggaccttattgataattgttaatcttgtctcgataataatcacttcgcttcagctgctgctactactgatcattacgctcagcaccaacatttcgctggtgtttctcagaagagttatgctggggacagtgttgttccggttcagcaacaccagcattttcagcttgggttggagtttgacaactccaaacctgccttcagttacaatggttctgttagtcaaagtgtttcagtttcatcaatggatattggtgttgtacctgaatcaccaatgagggatgtctcaattgcccatacaagaccccccaaagggacaattgacctattttctggacctccaattcaggtgccttcccatttttctccaatggacagggaggccagagtcctaaggtacagggagaaaaagaagatgagaaaatttgagaagacaatcaggtatgcctcaaggaaggcctatgcagagactagacctcgtataaaaggtcgatttgccaagagaacagatgtagaagctgaagtggatcagatgttctcgacaacactaattacagaagttggatatggaattgttccctctttctgaatatgctgtgttgaacaaatggccagaagatatcgaagatgctagaggatcatgatcaatagaaatggctaccacttgtgtactaataatgtattttttatgtaatctaattacttgcagttgtactaatcggatgctttattattttgtttattgtcttttgaatgaaacttgtacttgtaaatacagtccatgtattaaattattaaattacagtcaacatatctttgaaaaaaaaagcgaaaatttttcattttctcaatttc

SEQ ID NO: 29895 - DNA, 505 bp, Glycine max
  Clone ID: TF_GmC162685_1
gttctccaaattcaaaacagagaacatgtgactattgcgggagcttcacggctcttctgtactgcagagccgattctgcgaagctttgtttcttctgtgaccgtaaagttcacttcccaaaccagcttttctcgaagcacaagcgcgcgcagctctgtgatgcgtgtggagattcccctgcctcggtgctctgttctgcagaaaactctgttctgtgccaaaactgtgattgcggaaagcaaaaacatttggcgtctgaggcgcaccaacggaggccactcgaggggttctcggggtgcccttctgtgactgagttgttaacaattctgggtctcagtgaaaaatctctgctttcaaatgagggaacttcccagattgatgatgacctttcggatttgcacgtgtggagtgctccttctattaatggtcttgaagatttgatcactaccacagcttcttctcaaaaggaacgtgtgggtgcgtgcgggagacacaaagaagagat

SEQ ID NO: 29896 - DNA, 2125 bp, Glycine max
  unsure (1)..(2125): unsure at all n locations
  Clone ID: TF_GmC919_1
ctccctcgtaaccaaaagccatttccaactcaaaaaacatggctccttttcctcttatgtgcttcgttattttgctcctatcctccactgtttcagtcacagccaccgccacccaaacaaccttaacagtgggaaaactcgaccaagttccacacataatgtgcaaggagtgcgagcttccacccccaccccctaaagagtgtcctccgccgccgataccactagcacctccaccaccgttaccaccatcaccttcaccaccgttaccaccatcacctccaccaccgttaccaccatcaccttccgcaaccttaccggcacctataccgctaactcactcactccccaaactcattcaagtcgctaatcctagttccttcaactcctcgctggcaacaacagcagtactaccattagccgcgtttttcaaaagtgattttcgagaattagcgatgggaattgaaagaggaggcttcaagggattcaggagcgcctggagcgtgccgcccaagccgtgcgattcctgcaagctggcctcggcggcgcttttctgccgccccgattccgcgtttctctgcatcgcctgcgattccaacattcactgctcgaacaaactcgcgtcgcgccacgagcgcgtgtggatgtgtgaggtgtgcgagcaggcacccgctgctgtcacgtgcaaggccgacgccgccgccctctgcgtcacgtgtgactccgacatccactccgcgaaccccctcgcgcaacgccacgagcgcgtccccgtggaacctttctttgactccgctgagtccatagtgaaagcctctgctgccgccaccttcgggttcattgtcccatccgacgacggcggcgcctccgacgctttcgcccccgatgactccgacgccgccgcgtggctcatcccgaaccctaatttcgggtccaagctcatggacgcccccgaaatcaagtccaaggagatattcttctctgaaatggaccccttcctcgattttgattactcaaactccttccaaaaccacaacagcgccggaaacgacagcgtcgttccagttcaaaaaccctctctcgcccctcccctaatcaataatcaccaccaccaccaatcagaaacttgcttcgacgtcgatttttgtcgctcgaagctctcctcctttaactacccttccaattctcttagccaaagcgtttcgtcgtcgtcgcttgatgttggagtggtgccggacgggaacacggtgtcagacatgtcgtattcttttggtcggaacagttcggattcgagtgggattgttgttgtgtcaggaaatagtgtggggcaaggtgcgacgcagttgtgtggaatggatcgggaagcgagggtactgcgatacagagagaaaaggaagaaccgaaaattcgagaagacaattcgatacgcatcgcgaaaagcatatgcggaaacccggcccaggataaaaggccgcttcgccaaacgaacagaaattgactcggatgtggagcgtctctatagccctggccctgcggtgctcatgctggacactccatacggcgtcgtaccatcgttttagttaatttcaaaatgaagaaacgatggagtgcatgaatcttagaataatgattagcgattctgtgggattgttaggggaaaaaggtgaagaatcgaatcggtacgaacgtgattcttagctggagcgcgatgggggaagattattgtgaagatttgtctcgatcgaccagaaaagcccgtttactttttataaaaaaaaaaacaacgtgcttttttaaggggtctactgtttaatattctcactgccttgcctgcttctgtctttcttagtattaaagtgtcttttttttgctcagctatatcacggatctctttccccattcctattggctgtcctccccaactatatatatatatcacttttttaattcattaccatcatcatttaacacttcacttttttattatatactcctcatcaaaattccaaggtcacaccaagccaattttcggtctatgattccctaatattcatttaagaaatacttgtgctttatttactcttttatgttaacatttcaattactgttgagcattnnnantccaaga

SEQ ID NO: 29897 - DNA, 215 bp, Glycine max
  Clone ID: TF_LIB3138-069-P1-N1-A9
attcacagtttatcaaaactatcatacccacatggattggcgatgaatgtgagagagtccaattattcaaacgctttgtgatgcttgtgagagcgcccaggctatagttatttgcgcctctgataaggctgcactttgtctagcctgtgatgagaagattaatctttttgagcttacaggatcacatgtgcaacaagctatctcgtacgtatgtt

SEQ ID NO: 29898 - DNA, 412 bp, Glycine max
  Clone ID: TF_LIB3242-471-P1-J1-G3
caagaaactaccaagtagcaagcttgattattattatcatcacatagagcttctgaaaatgtgcaaaggtgcagaaggagaaaagcaacatgggttctgcagcagctttctacataaagagagtgcaaccagaagtgctatatgttgtgagctatgtgggttacaggcttcattgtattgccaagctgatgatgcctacttgtgtaaaaaatgcgataaacgggttcatgaagctaattttttggcccttaggcacattaggtgctttctgtgcaacacatgtcagaaccttacgcgaagatatctcattggagcatcactagaggtggttcttccggccaatataaactggaccattagaaatctccttaacaacagaggaatctacagaaagtgttcaagaatgcataac

SEQ ID NO: 29899 - DNA, 519 bp, Glycine max
  Clone ID: TF_GmC906_4
gcataaccaataattgaatttgaatcatttgggtctctagacacaaacactaccccctctttccccctcctcaacattgttatgatcccttgttggtaaccattccatttgcacttgtctttgcaaccaaaaaacaagctctatgaccaacgaaatgaaagaagcaagtgccttaggagctagaacagcacgagcatgcgagagctgcctaaaagtaagagcacggtggtattgtgcagctgatgatgcattcctttgccatggctgtgacaacatggttcactcagcaaaccaattagcaagtagacacgaaagggttaagcttcaaactgcatcctctaaggtcaactactcagtgacccctaaggtagcatggcacagtggattcacacgcaaggcaagaacgccacgccacaacaacaacagacactcatcattgaaacaacaacaacaaaaaaaaccattacatgaagaacgaggagaggaagaagtgtttttcaataacactattagtcttct

SEQ ID NO: 29900 - DNA, 310 bp, Glycine max
  Clone ID: TF_LIB3028-010-Q1-B1-A12
atatgtcctaaactttctgcagcatcgttctccatttttggctttacagaatgactgtgtctgattaagggttctttagtatttccaatatttcttgtagtgaataagttgttagctaaatcaagatcaagtttttggtgttgtagaaggaagagaagaattaacatgagtattcactgtgaagtgtgtgagacagctccaggagcagtgatttgttgcgcggatgaagctgctttgtgtgccaagtgtgacgttgaagttcatggctcaaacaagcttgatcgcaagcatgaaacacctcttcttcaat

SEQ ID NO: 29901 - DNA, 733 bp, Glycine max
  Clone ID: TF_GmC36880_2
ggggagcggaggatgttgcggcggcgccgcaacaagactctgcgctcgctgcgaatccgttgattattgctctctctctcaccagattgcacactggaatcgtcacaaacacgagtgtgataggttgcaacagcaattgaaaagtgttgaagtcctcaacgattttcccttcactttctctcgcgaatccacgtttcaggtttgtgtgaagcaggaaactaggtgttcatttttgagcaagagaggtcttcatcaagtggaaatgtggatgcatgaatgcgcttgtggggcatcctctgcttcatttgattgtttagggtttcttcatatttccttcattttctgaaatatcagttatgagttcctttttgaaaaatccagtgattaagccatatataatacatctaatgattattcagttacaacttacaaccttttcagctagtttattagtttagagcaaacttaagctgaaatttattttttgcattaaacaatggttgggatctcccaagtaatttatgtctctgttgtgagcctagctctccggtatcagagcagttgcattgttggagagactactataagtggagatgcatcccgctagactcgcctgttgctttgcttcttcaatgggacctgagaaagagctgctacaacttgctgtgtttggagaattactggcactcttccccggtgtacgaaatcatatagaacttgttggacctgcaat

SEQ ID NO: 29902 - DNA, 730 bp, Glycine max
  Clone ID: TF_LIB4201-003-Q1-K2-F7
ccacgcgtccgcattgtcgtcgtctcggtttcttcccttctcgtggcagatgaggttggaagactagcacttttttgtttattcctaaatacatggacactgatgccactggagatcctgttgacaagctcaaggctatccagaatgatgatgtagaatatcaagacgaagatgatgattttgatgacgaagaagaagaagaagatgaccctattactcttggtttcgttgacaaacccaagaatgaatggtctcttcgccgtcaatatttcccaagcaaaactggtggagtcccggcttggcttgaccctctgaatataccatcagggagatcatctgtgtgtgacatttgtggagatcctttacaactcttgcttcaggtttatgcaccaactgacaaggaaaccacatttcaccgaatgttgtttgtttttatgtgtccctccatgaaatgtcttcttagggatcagcatgagcaatggaaacgccatccagagaagccatctagaagtgtgaaggttttccgttgtcaactaccccgcattaatccattttactcacctgaatgccctcagtataatgagagccacgaacctgctggcagtggagctgctctttgtgattggtgtggcacctggaaaggagacaagctttgtagtagttgcagacaagcacggtattgctctgagaaacaccaggctatgagttggcgcacagggcataaaactgc

SEQ ID NO: 29903 - DNA, 1576 bp, Glycine max
  Clone ID: TF_GmC165_1
gctcgagacctagggaggacacattcaatgacacaaaagcatactcaagtactggcttgagacagtgtgcaatgtgtgagaaagaagtgtatggagaacagtctatttgctgtggccggtgtagagcagttgtttactgcagttcaatctgccagaagcaacactggaacgacacacataaaagcatgtgtggactttacaaggccatgatggagagggaagaagagctggctataatgattttcatgttcccatgttctgctgaccagccttgtaagtggcttgaatcattaggtatccaccagaagggtatgtggaggagaaagtgcagttgctattctcactgctcttttggtctccttcctgtgaaaggtgggctgcaggaactatggggtggaattgatgaatttgaataccctcatgactctccatttaataaccatttcatctcaagcccgtttcttctctctggttggcccgagtactacaaccttcgttcgcttccattgtcaagtcctgttgccgacattctctcgcatccattgactgtgtatcacatactaactacccttaatataagttcaaagaaccttatactgaaagggaaagaggtgattgtccactaccttggacctgaaggcgagttggattggatgccagcatttgcagaagtaggacacttgcttaatgggttaggcaatgtacaaatagtgatggtgggaccagaagttccaacaaatttatcgggtacaacctcaggaattggtagcagagttagagtgaatcttgtgaggggtgtttatcaggtggaagcctcctacctaccttctccacatgttgtcattgctctgaattctagattagaaagctattctagttggggtggagctcttgatgtaatcaaatcaattggggtgcctgccttcttcactgatcaatccgaagtttcatgtgtaaatgctaaacaagtccttcggaatgctggactgcacatcacacatccggtgactccaaatcctttccggtcacctgtgaaaaatctcacagcttctagcaatcttccttcatacagcaatggttttgtctttggggtgaatacttgaatgcagtccaagaaaatccaaaaacaagtgtctgtctactgtcatgcattctcaagattgcagccaacttcaaattttctcgattgtcgtgcaatttgctgaacatcacagtcacagcaaactacaaagatcattgtatgtctcattgaataatgtatattgatttcagtttagccagagatcttgttatagtctctgagttatggaccctgtggtttttatataattttttatgtagagcctccagtgggctgagttctttggttgttttccccttatcacattgaagtttatctgtttatgtcacttatctctcctaaaatcttgttcagaatcctcagaaccttgtctgtataagttgaaatcaaatgtcagttgttgtggtaaatcaataccattctgctcaacccgtagtggcccaattgttttggagagaaataaaccaatgttgcagttgctattcacactgccct

SEQ ID NO: 29904 - DNA, 1691 bp, Glycine max
  Clone ID: TF_700665732_FLI
ggcgccctctatcattgtcgtcgtctcggtttcttcccttctcgtggcagatgaggttggaaggtcagaaaccgaaccgtctaacccacacaaacacaacccagatactataattgactagcacttttttgtttattcctaaatacatggacactgatgccactggagatcctgttgacaagctcaaggctatccagaatgatgatgtagaatatcaagacgaagatgatgattttgatgacgaagaagaagaagaagatgaccctattactcttggtttcgttgacaaacccaagaatgaatggtctcttcgccgtcaatatttcccaagcaaaactggtggagtcccggcttggcttgaccctctgaatataccatcagggagatcatctgtgtgtgacatttgtggagatcctttacaactcttgcttcaggtttatgcaccaactgacaaggaaaccacatttcaccgaatgttgtttgtttttatgtgtccctccatgaaatgtcttcttagggatcagcatgagcaatggaaacgccatccagagaagccatctagaagtgtgaaggttttccgttgtcaactaccccgcattaatccattttactcacctgaatgccctcagtataatgagagccacgaacctgctggcagtggagctgctctttgtgattggtgtggcacctggaaaggagacaagctttgtagtagttgcagacaagcacggtattgctctgagaaacaccaggtaactgaattacttaaatgtattatgtatccttattttttcttccacaaatttgatttccatgacattccttttctcttccaactcacaggctatgagttggcgcacagggcataaaactgcttgccaacagatgaaagtttcttcacctgtttttggacccaacaaaagtggaaccacctccttggagtctcataaagttggaagcaagaatctgtggcctgaatttgagatcagcattgaagatgaaagtgaatataatagggacatatctgaggaaaatagcttagctaattccttgatctctaggaacaggaatgatgacacaatgaattcacttatggataactttaagggtgatgatgacaaaaagagctgggcctccttccaggaacgcattgccgaggctcctgaacaagtgttgaggtattataggaatactaatgccaagccaatatggcctgtttcaagtggtcgaccatccaatgctgatatccctaaatgcagttactgcagtggaccaatgtcttgtgaatttcagattttgccacaactgctctattacttcggcgttgacaacgaagtggactctctggattgggcttcaattgtggtgtatgcgtgtgaagcctcttgtgaagcaagtttgccttacaaaaatgaatttgcttgggtacaaatttattcactttccacaaccttatagagaaatgtctttttttttttaatttttttatataaattattatcgtttttaaattttgggctcagaagtatatgttattcttcgtttgacttggtggaagtatgaggaaggattttctttatctacttcaactatcaattttgaggattggctgttgattgtgtaatttataggataggcttgattaggatgtgtacgtttttcactgaaaaaatgataattaattttgctac

SEQ ID NO: 29905 - DNA, 2052 bp, Glycine max
  Clone ID: TF_GmC5714_1
gcggcgcgcccgtgccgttttggagattcattacattaccctcttatatataacttgttacttagatttttcttcttctttttttatctctcaacggagagacagaaaaaaagaaagaacgagagagtgattaattagagggacatgagaacaaggagaggtgcgtgttatcctggtgtagtctcaaggatgtgctccaatgtgagggttacgaagaaaaaaagcaaggatctgcacatgcatatgcatgttcctgccggagactccattatttatagccggaaaaagcagaagaaaacgccggaaaaactcgccgccggtcgttacgattttttcgagtccttgccggatgacctcgtaatctccatcttctgcaagcttagttccaccgccactaaaccttccgatttcgtcaatgttttaatcacgtccaaaagattaaacagattagcacttcattcgcttgtattatccaaagcctcgccgagaactttcactattaaagcaaaatattggtgcgattcggcacacaaattcctcaaacactgtgccgatgccggaaacgttgaagcttgctatactttaggtatgattcggttctactgtttgcaaaaccgagggagcggcgcgtcgtttatggcgaaggcggcgattaactctcacgcgcgggctctgtatgcgctggccgtgattcagttcaacggcagcgggggcacgaagagcgacaaggacctacgcgccggcgtggcgctatgcgccagagcggcgtttctcggccacgtcgacgcgctgcgcgagctcggccactgcctgcaggacggttacggcgtgcggcagaacatcgccgagggacggcggttcctcgtgcaggccaacgcgcgtgagctcgccgccgtgctgtccaccggcgccgccgcgcgtaccttgctgagttggaatcttcagccgcagcagctccggcaggggtccgggtgtccgcttctcagcgatttcggatgcaacgtgccggcgccggatgtgatggcggagtggttcgtcgcgcggggcggttcgccgggaccggggctgagactctgttctcacgcggggctctgttctaacgcggggtgcgggaggcccgagacgaggaagcacgagtttcgaaggtgttctgtgtgcggcgaggtgaattattgctcacgcgcgtgccaagcgcttgattggaagttccggcacaaagcggagtgcgcccccgtggagcgatggctcgacgaggacggcgaagatgtcggtaacgacgacggtgacggagaggtcgaggttgttatggtagatagttagacaatttttacaacagtaacggcaacggaagtcgctttggacggaaaatgaatctatttttggcgaagagaaattacttgtcgtgatttattcgccgtctcaaaaaggtagagagaatatggcttcttttcgttttttccttgtatagtttgaaaattctcccgaaaaaaaaaaaagacgaggggagattatttttctttttttttttgttgcaatttcggagtttaacgttaattagaaattagaaattcaatgctaagaggttactagttactaatttttgttattaatttaatcgatttgaacgtaattagtagctttgaagttttcttttattatatgagtagcttttattaaaacttgagattcacttaaatatattttacgtttttttttaatttaaatgtagtactatactcccctcttatattattataatatatattttacagtttaatagttactctattttgtttggatttgagattttagcggatacgacaaaattaaatgtgatttggtgagctgtgatttgtctctattgatttaatgcggcgccatcgcataaggttgaaaaatgaatagttgtgaaaataaatctaatcagttcacggacatcagattttgctttcatacaattttacctctcccctcacatgcatgagatgattacagagggttgattgattctatgcgatccaacaacttgttagtggcgtaaagaaaatatta

SEQ ID NO: 29906 - DNA, 3449 bp, Glycine max
  Clone ID: TF_GmC3960_1
ggtgggttgaggagagattaaggaatccttttgaccgttgaaaaggtgaaacgggtgaagtgttggaggtttttccttttattcttccctttcttgaaggttttgatagccaggaattgggtaatgctacacttgaaatttctgcatagtacgtgcttgattagttggaattttaggggaccctattctgacatgcgtttttggaagaaatctaggctttgtgattcttattcgcgtaatctcgaacagagaaaatctgattgagctgtagtgtttccgatcttggctgtgcttgcctgggggaccatctttctacttggaaaatggagtgaaactagtaagaagagagataggataaatttgcttgcccatttggctgctgaagaagctctaagagctgaagaaatggccgtggctgatgtaattcctccagtgtctgcttcaaaaaatgaacatcatgtgtgtgctaggtgctctgctccagccagaactcgctgctccagatgcaaaattgttagatattgctctggaaattgtcaaataatccattggaggctaattcacaagcaagaatgccagcaactggaacctcataaagacctgaccttggagatattgggttgggttgagtcactggaagatgcgctgactcagtttacttcccctgaagatttggatggagagaatatgtacagatgtggaaggtgcacatcatatgttcgagctagaaagcaactgagcatacatggcactgctgctcctactacagctgatttttctgtatttaataactttcaacattctgcttttgaaagaacttcacataaatccaacagagaaacattgagaagagataatggctctatatatgaatcttctattgaatcttctgattataaagctagcagttctctctcaagtgtggtaccaaaggaggcgtttatgagacagaagtcaagaaagagcagtgattctgtgttggaagaagaaatttcaatggtgtattcccagtgctatgtaatttatacatgtcagaatgagcatatatactattctacatgaggtcctgtccccgtccaaaggtagaacatactatgaatgccatgcagcaacctgtatatgattcttaatagcacaatccaatggaaatgcagaaacctaataaaccaggacatagtaggcatggcagtcgtcagttttttgtcccagagccatcacctaatactaggccagaaatcaccactcacattattgacaccaccaatggcttccttagaaaaagcaccaataggaatgccctgccggtgacccaaacttatgccgaaaacgtcaggcgtgagttttcagatgccacatcaagtgactggtcccttttcactagctcagatgaggcttctttcacaactgagagcaccagggactccttcagcactgtagactatggtgattcatgcaacatggatccaatttcatctatcttcaactacccctcagaaaagtcctacttgaagttttcacatagtaggccagttaccagggtcttccctgaaaagggtcatgttaaacaagtacagaggattgatcattccaaaagggtcagccattcttcttcaaatgagcatccactttggcatataccccaggggcctgttaaattgtgggaacagttgctatgccaatgctgtcttgcagtgcttaacttctacaaagcctctagttgtctatttgctttatagatcgcactcaaaagcttgttgtgctaaagattggtgtctcatgtgtgagttagagcaacacataatgattttaagagaaaatggggatcctctatctcctagtcggatactttggcatatgcggagcattaactgccatatgggtgaaggaaatcaagaagatgcccatgaatttttaaggcttctaattgcatcaatgcaatctatatgcttggagggacttggtggtgagaaaaaagttgatcctagaatacaagaaacaactttcatacaacatacttttggtggccgtcttcaatccaaggttaagtgtttgaattgtaatcatgaatcagaaaggtatgagaacattatggacctgaccttggagatattgggttgggttgagtcactggaagatgcgctgactcagtttacttcccctgaagatttggatggagagaatatgtacagatgtggaaggtgcacatcatatgttcgagctagaaagcaactgagcatacatgaggctcctaacatcttgactatagttctgaagagatttcaggaaggaagatatgggaaaattaacaagtgcataacttttcctgaaatgctggatatgattcctttcatgaccgggacgggtgatattccaccactttacatgctttatgctgttgttgtgcacctggacacactaaatgcatctttctctggacactatgtttcatatgtgaaagatctgcaaggcaattggttcagaatagatgatattgaggttcagccagtactagttaatcaggtcatgtcagaaggagcatatatcttattctacatgaggtcttgtccccgtcctccggtggaacatactgtgaaagctgtgcagcaatcagtttatgattcttcaaagcacaatccaatggaaatgcagaaacctaataaaccaggacatagcaggcatggcagtcatcagttttttgtctcagagtcatcacccaatgcgaggccagaaatttccactcacattattgacaccaccaatggcttccttagaaaaagcaccaataggaatgccctgccggtgacccaaacttacgccaaaaatgtcaggagtgagttctctgacaccacctcaagcgactggtcccttttcacaagctcggatgaggcttctttcacaactgagagcaccagggactccttcagcactgtagactatggtgattcatgcaacatggatccaatttcatcaatcttcaactaccccccagaaaagtcctacttgaagttttcacatagtaggccagttaccagggtcttccctgaaaagggtcatgttaaacaagtacagaggattgatcattccaaaagggtcagccattcttcttcaaatgaacatccaccaaatgggaattgtggcatgtatgtatattatgggagtaatcctgtgtgtggtactacccagacttctagtcagtgtgaattttagtctttggggaatcctaacttgttgaactgattattagatgcagtaggtgctgtgcctcaaagttttcaatacttagttgattgaggcatatagttcttttaagcacagatgtattttttttttgttattgataattgtaaagatgacggcatcgatcctttagttatctattaatccatcagtcttttcctagtggtatcactgttcaatttcatatttgagactatttttaaacttgagtt

SEQ ID NO: 29907 - DNA, 708 bp, Glycine max
  Clone ID: TF_LIB4198-004-Q1-K1-B8
cacgcgtccgggggaataaggaatcttttgaagggtgaagagagtaaagaggtgaagtgttggtgggttttgctcagatttcttctctgtgttgaggatgatacttgacaggtttgaatgctggggaatgggttatgctgcacttgaagtttctgtttactcagatgctgattacttagacttttaggggatgatattctgattagtgattttgggaggaaactggacatgagtatgcttgtggggatatgctcgaaccgcgagaatctgatatacctgtcctgtttctggtcctggttgtgcttcccttggtggcttacatcttacttggaaaatggagtgaaactagtaagaagagagataggataaatttgcttgcccatttggctgctgaagaagctctaagagctgaagaaatggccgtggctgatgtaattcctccagtgtctgcttcaaaaaatgaacatcatgtgtgtgctaggtgctctgctccagccagaactcgctgctccagatgcaaaattgttagatattgctctggaaattgtcaaataatccattggaggctaattcacaagcaagaatgccagcaactggaacctcataaatcaagctcatttcctctggctgtttcagttgaggaatttggtcatggggatggtagttacttttatgaaaatttgaacaaccagttcttaagtccctctt

SEQ ID NO: 29908 - DNA, 1752 bp, Glycine max
  Clone ID: TF_GmC3636_2
atttcaagtaatcgtatttaaaataatagaataaattccaccgaacctttataaaagttacagcaatctatatctacatctagttagtggctcgagaaagtcctaccactactccacactttcttataagttataacaatcaacccactctcagattacgctctgttgaatgaaaagctaaggaatatgagaaggccatggaagcattctaagaacaaacatgatctctttgaatgtcttccggacgatctcgttgttcttattctttccaagctcagcgccaccgcttcatctccttccgatttcatcaacatcatcttaacatgcaagaggctaaaccgctcaggcctgcaccgtcttgtgttgtctaaagctgggcccaaagtattcgccataaagccgaaaaattggtcagaatatgctcactcttttctcaaacactgcgtcaatgccggtaacgtggatgcctgttacactctcggaatgatccgattttactgtttgaaaaaccgagggagcgggctctcgttaatggcgagcctgcgtaaccggtccggattcccggtcctctacgcgtccgcagtgattcagttaacggtagcggcggttcaaagcgcgataaagatctacgcgctggcgtggccttgtcggcgcgtgcatctttactcggccacatcgacgcgcttcgggagttaggccattgccttcaagacggatacggcgtgcggcagaacgtcaccgaggggagaaggctcctcgtgcaggccaacgtgcgcgagctcgcgtatgtcctacgcgccgtggcgcctccttcgcgctgctgcgacgagtcctcctcgctgctgacgtggggcgcgctgagatgtcagagaaaaaacaacaacgcggtgtcatcactggcgtgtccgttgctgagtgattacggttacagcgtggcgccgccggaagtgcaaccggcgaattggtttctgagagagtggtttgagtcaggtaaggggaaattagaagaaggactgaggctttgcgcgcacattgggtgcggtcgaccggagacgcggccacacgagtttcgccggtgttcggtttgcggcaaagtgaattactgttcacgtggatgtcaggcgctggattggaagttgcggcataagattgagtgttcgccggtggaaatgtacggtgatggtggtgttgatgtggagaatgagtttgtggtcccaaacgatgccgtttgaagaagtgtttcagcgacagaatcaatttctaaggttgaaaaataagaaaatagagaggaaaagaagcgattctataaattaaaaaaaaaatgtcaatcagttggtatgtactatgtacagatgaggtagtaacttttatatatatgtatatatatttatggacaactaagattaaaagttctttattataaaggtcctatgtatggggcgggtgctgcctcaagaaaggagcatgagaagccacacatgaatcgtcgttgaaattcaagttattgctattggtgatgaagaaaggcttgctatcactttgccttctctatttgcagaatagctgagattgagtttgatgtccttctgtgtatgcatgcgacaacagtggtcattttatctggaactctggatatatttagtcctaaactggcatatgtaggttttagtgtcgctttgcttttttttaaagaaaacattgctgcagtatctcagtttataatttagtatgatggaattcttcactttatct

SEQ ID NO: 29909 - DNA, 652 bp, Glycine max
  Clone ID: TF_LIB4167-022-R1-K1-H1
ggtcgacccacgcgtccgggtggtttgtgttgtggtggcggtgatcgggttcgttattcggcataaatggcaggtttcggaggccaggaaggaggagatcaagaggcttttcattttggccgcggaggaaactgccagggccgagaaagaggcgtcctatgagtacggcacggcggtttctgccgctccgaccaatctatgcgctgtgtgttattttcccgccaccgcgcgctgcgctcagtgcaaatccgttcgctactgttcttttgaatgccaaactgttcattggcgtcaaggtcacaagttagaatgccgtcctcccagcacaactcaccagagtgatggtgcaacgagtgatcttggcagcaaggtagtagagcaaggctattctggaatccatgttgggaagtctgaaagtgaaggcaaagaatgtaaaatagcctctgaaaggcccccaatttttgatatctgcttttctccaaaagtttcatctggaaaggatgcaaatattagagttgagtctcttgcagagggaaatataacagattctaattctgaattgtccagtaactcattttctggattctcagcttgcacgggttctagtgattcatctggaggttcctctgtgtgtgggagcgtgatgtggaat

SEQ ID NO: 29910 - DNA, 1905 bp, Glycine max
  unsure (1)..(1905): unsure at all n locations
  Clone ID: TF_GmC586_1
tttttactttatctctctctctcttcaaagttcaaagttccaagttccaagttccaagtttcaagttccattacacaacacacctattttagttgtagacaaagccacataaatagacccaagaggtttaacttaggcaacgaggagacgcctctcttatcctccacttccagtttcaaccatgtcctgccggaaaagacaaaagacttcgccggacaaaacctccgacgacttcttcgactctctccccgacgaccttgtcctctctatcctctgcaagctcagctccaccgcaacttccccctccgatttcattagtgtcttaataacgtgcaagagactaaactccttaggccttcactctcttgtgttatcaaaagcttcccacaaaacattctcagtcaaagccaaaaactggtgcgactctcttcaccgtttcctcaaacattgtgcagacgccggaaacattgaagcctgttacactctcggcatgattcggttttactgcttgcaaaacagagggagcggcgcgtcgctgatggcgaaggcggcgatgaactctcacgcgccggcgctgtactcgctcgcggtgatacagttcaacggaagcggcggcaccaaaaacgacaaggaccttcgagcgggtgtggcgctttgcgcacgcgctgcgttcctcggtcatatcgacgcgctgcgtgagcttggtcattgcttgcaagacggttacggcgttaagctaaacgtaacggagggacgacggtttttggtgcaagcaaacgctcgtgaactcgccgccgtgctctccgccgggaataccaagcgcccctggctgacctggagccaccaccctgtcacccacccgcggctccggtcgggttgcccgttgatgagtgattacgggtgcaatgttccggcgccggatgctcacccggcgagtcagtttatgtcggagtggtttgatatccggggcgggtttccgggtccggatatgaggctttgttctcattcgggttgcgggcgacccgagacaaggaggcacgagtttcgaaggtgttcggtttgtggtgtggtgaactattgctcacgcgcgtgtcaggcgcttgattggaagtttcggcacaaggcggaatgtgctcccgttgagaggtggctcgatgacgacgacgaagatgtcgccggcgagaatgacggcggagatgacggagtaatgatggttgatagttagaaaactagactatttttacaaacgttaacggtgacggtaagcctgcttggaagtttcgacgggtatgaatctatttttaacatggggtaaaatggggggaaaaatctcatttattaccgtggctttgcaagtgcaacttcaatgacagggttttgcttcgacctcttttccttttacttttactgttgtatagaaccgtaaattaattctcctgaaaaacaaaatgaaggggatattttttattatagagcaactatcatccttaattaattgttaattctggaaaattataatatatgaactttttatgtttgttcttccaatttatttaattactttttatttgcttgattacattcttgcctccctgcagactccgccatccccgtgtcctccaagtgttggtggcttctggctattttttgcggccacccttcttggccccgtcccttccgtggatatttatttctcgcgtgctgggtggagctgcgtccaatcttctgggggggtttttcttatataattgcatacagaaaagaatgtccaggaaagtgttaaccggaaagtaaagagtgttggaatattaataatctcatttggaatcatagagtcacttttctacatataaaatgtattcttatcttaattnnatnnngtcataaataatatttcccccnnna

SEQ ID NO: 29911 - DNA, 535 bp, Glycine max
  Clone ID: TF_GmC24110_3
ggctcgagacaagaagaaagaatctgaacaataatactgatacacacaacactaacactaacaagaagggaggaagaagctgaaaaccctaatctgcagagatgagatgagatgaaaatgaaaaggcgtggaatcagcgcggcaaggaacatcgtagatgcttgtcttgggagtgtgggatctcaaatggctcctccaattcgtattctccgcgttcgtcttggcgattggactgcacgcgctgctcaagaacaccgcctccaagtacttcgagattgaagccactttccacgctatgcctggccctctcaccgaccattctctctgcgccgtttgtcgcaaccccgccaacaagaaatgttcgcgatgcatatccgttcgatactgttcacaagcatgtcagcaggcgcactggaaatccgagcataagatgagatgcaaggagtttcagggcagcgccagtgtgatgaatcttgatcaaactgaagtaactaatcgtgttttcaaagcttctgctgctgtgaatacaagttca

SEQ ID NO: 29912 - DNA, 2813 bp, Glycine max
  Clone ID: TF_GmC5789_1
aaaaggacaccggagggggtttaaatggaatgggtccaggggttatgtaaaggcttggaaccgtttaacagggaaacgagctccaaatattctcacaattctgctgcgagaagacgacagaagggggaaggaagagagattcaggagggagccagagtgagggatacagagaaagaagaaggataaagatttaaaattggaagaggaacaataggaagggaagggagaaaaccctaattaatagataatagaaagagattgcatgatcgatggaaaaaccctagaagaatcatcggagcaggcaggcaagggggcacaatcgacgacgccgtagatgcttgttgcggttggagcgtcgtgggatctgaattggttcctgcaactgttgctctccgtcatcgtcgtggccgttggggttcactatttcgtcaaggccaccgcttccaagtacttcttagtcgacgccaatttcgaaggggaccaccacgccctcgccgccgccgacccaatgcccggcgctctcgccgccgccgttgatcctctctgcgccgtctgtgccacgcccgcccctaagaaatgctcgcgctgcaaagctgtcagatattgttcacaagcatgtcagcagtcgcattggatgtctgggcataagacagtgtgcatgaattttcatgggaccaatgcaagaagctcggctcagaatggggtaattaatcgtgggtttaagacttctgctgctgggggtaaaggctcgtcgtcaattgcactgatacctgactgtggagatggagcaatttccaggccaatcaagcaggctaaagatgttctttttccttacgatggtgaatgagatttcttgtggtgctgttgaatcatcttatgtgcccatttctcaaacagacagtgatttgggggatgtagatatgggcagatcattagaagagacttcaggctgcaaggaagagcaagatgatactgatatggttagttctggtctttgttcgggtccaccaaatgacaattcctttgataagcacccttccgtttcacgtgatcatcaaaacatggaagaagattcagaacatatcgatgtggttaactgcattggtggtacactggctatggaaaacaagaggatgctcacgagttcatgaggttttccattgatacgatgcaatctgtttgccttgatgaatttggtggagaaaaagctgtccctcctaaccttcaggagaccacccttattcaagaaagtggaaatatcagccgacatctagatgcaatttgcacaaaatgtgataagatttcaaatcagtatgaaaatatgatggacttgacagttgaaattcatggagatgctgcctccttggaggaatgtctagaccagtttactgccaaggagcggcttgatggggaaaatatgtataaatgtgaggggtgcaaggattatgtcaaagcatggaaacgccttacggtgaaatgcgctccaaatattcttacaattgccttgaaaagatttcagagtgggaggtttggaaaacttaacaagagagtagccttccctgagactttaaatcttagcccttacatgagtgaagctggagatggatctgatatttataagctatatggtgttgtagtacatattgatatgctaaatgcttcattttttggtcattacatctgttacatcaaggatttccagggaaactggtataggattgatgactggaaggttatgactgtggaggtggaagaggtactttctcagggagcatacatgctcttgtatagcaggtgtagtgcccggacatcaagctttcaaattcaaactagcgaatcttcagggatagcagaagttcagacagaagtggaagtggaaatggaagtggagcccggacaaactgaacaagatgaatgcctctcaaatatgaaggctttgacttgtagtagaggttctgaggttttgccatctgatgctagtccagaattgaaggtttcttccagctatgactgtgagtcttttgctggattgaactcaccagtcaaaagagaacagtttaatgatgtggacatgatggatgttgattcaactggtattgtgaatgagatttcttgtggtgctgttgaatcatcttatgtgcccatttctcaaacagacagtgatttgggggatgtagatatgggcagatcattagaagagacttcaggctgcaaggaagagcaagatgatactgatatggttaggtctggtttttgttcgggtccaccaaatggctcttccttctttgataagcacccttccgtttcacgggatcatcaaaacatggaagaacattcagaacatatagatgtggttaactgcaagttgattacagctaaagataatgcatgctatggtaatggatatgtcagtgcaaacgattcttcaatgccagttgaagacgcaggctcacaattttctggcatcagttcttttcccactgaaaatgacaaaggaaatggaattaagaaagtggaaatatcagctgacatttaggtgcagctatttttgttatttcttcatatcatttaattatcccatcatcgaaaaaggtggtgagttgggaaatttttgtccggggtttcattatttgcaggaccttggatcttatttctaacatttttagatggatatcctattttaattttactgatagaatacaagtcctttgtccttatatcctccctccaatcttgtacatacgagaaacataattcttccaagttgctgtggacctccattgtcgggttggtttaatcattttgactccccc

SEQ ID NO: 29913 - DNA, 1710 bp, Glycine max
  Clone ID: TF_GmC880_1
cggtcgcgtgaacgaacaaagacacggacggtccgcttagagctttctgcggcgccctctatcattgtcgtcgtctcggtttcttcccttctcgtggcagatgaggttggaaggtcagaaaccgaaccgtctaacccacacaaacacaacccagatactataattgactagcacttttttgtttattcctaaatacatggacactgatgccactggagatcctgttgacaagctcaaggctatccagaatgatgatgtagaatatcaagacgaagatgatgattttgatgacgaagaagaagaagaagatgaccctattactcttggtttcgttgacaaacccaagaatgaatggtctcttcgccgtcaatatttcccaagcaaaactggtggagtcccggcttggcttgaccctctgaatataccatcagggagatcatctgtgtgtgacatttgtggagatcctttacaactcttgcttcaggtttatgcaccaactgacaaggaaaccacatttcaccgaatgttgtttgtttttatgtgtccctccatgaaatgtcttcttagggatcagcatgagcaatggaaacgccatccagagaagccatctagaagtgtgaaggttttccgttgtcaactaccccgcattaatccattttactcacctgaatgccctcagtataatgagagccacgaacctgctggcagtggagctgctctttgtgattggtgtggcacctggaaaggagacaagctttgtagtagttgcagacaagcacggtattgctctgagaaacaccaggctatgagttggcgcacagggcataaaactgcttgccaacagatgaaagtttcttcacctgtttttggacccaacaaaagtggaaccacctccttggagtctcataaagttggaagcaagaatctgtggcctgaatttgagatcagcattgaagatgaaagtgaatataatagggacatatctgaggaaaatagcttagctaattccttgatctctaggaacaggaatgatgacacaatgaattcacttatggataactttaagggtgatgatgacaaaaagagctgggcctccttccaggaacgcattgccgaggctcctgaacaagtgttgaggtattataggaatactaatgccaagccaatatggcctgtttcaagtggtcgaccatccaatgctgatatccctaaatgcagttactgcagtggaccaatgtcttgtgaatttcagattttgccacaactgctctattacttcggcgttgacaacgaagtggactctctggattgggcttcaattgtggtgtatgcgtgtgaagcctcttgtgaagcaagtttgccttacaaaaatgaatttgcttgggtacaaatttattcactttccacaaccttatagagaaatgtcttttttttttaatttttttatataaattattatcgtttttaaattttgggctcagaagtatatgttattcttcgtttgacttggtggaagtatgaggaaggattttctttatctacttcaactatcaattttgaggattggctgttgattgtgtaatttataggataggcttgattaggatgtgtacgtttttcactgaaaaaatgataattaattttgctacaatgaacaaggttgtaatcaagtttcaccgtctgaattaaaatagaattaggttgtgagac

SEQ ID NO: 29914 - DNA, 665 bp, Glycine max
  Clone ID: TF_GmC5714_2
cggatgcaacgtccgggcgccggaggtgcaccccgcgagcctgttcatggcggagtggttcgccgcgcggggcggttcgccgggaccggggctgagactctgttctcacgcggggtgcgggaggcccgagacgaggaagcacgagtttcgaaggtgttctgtgtgcggcgtggtgaattattgctcacgcgcgtgccaagcgcttgattggaagttccggcacaaggcggagtgctcccccgtgcaacggtggctcgaggaggacggcgaagatgtcggtaacgacgacggtgacggagaggtggaggttatggtagatagttagacaatttttacaacagtaacggtaacggaagtcgctttggacggaaaaatgaatatttttggcgaagtgaaagaaaaaaaggaattacttgtgatgatttattcgccgtctcaaaaaggtagaaaagagtatatggcttcttttcttttttccttgtataggtcgaaaattctcccgaaaaaaacgagaggagattatttttctttttttattttattttgcaatttcggagtttaaagttaatttagaaattcaatgctaaaactaagaggttactagttactgctataatttttgttattaatttaattgatttgaatttaattaatagttttaaaaa

SEQ ID NO: 29915 - DNA, 973 bp, Glycine max
  Clone ID: TF_GmC24110_1
cggtccggattccccggtcgacccagcgtccgcaagatacagtgaaatgctccaatccaaccttatttgcatcaaaaaaaagaaaaagaaaccgcttctccttaatccctcccacttgttctgtttcagaattagaaaactaaagaacaagaagagaacaacggaaactaaacgtagtacacatcactaactctaacaagaaggaaggaaggaaggcaggagaatcagaaagccctaatcgattttcggttattatggagagatgaaaatgaaaaggcgtgggatcagcgcggaaaggataatcgtattcgtagatgcttctctcgggaggagtgtccgatctcaaatggatcctccaattcgtattctacgcgttcgtcttggcgattggactgcacgcgcttctcaagaacaccgcctccaagtacttcgaccttgacgccactttccacgctcacgctattcctggccttctcatggaccattctctctgcgccgtttgtcgcaaccccgccaacaagaagtgttcgcgatgcaaatccgttcgatactgttcacaagcatgccagcagatgcactggaaatccgagcataaggtgagatgcaaggagtttcagggcagcagcaccagtgtgatgatgaatttggctcaaactgaagtcactaatcgagttttcaaggcttcttctgctgctgtgaataggagtacatgtacttcttcaattgccctcattcctgaatgcggtcgtggaacatccaggactatcaagcagcctaaaagtgttctctttccttatgacgaatttgtcaaattgtttaactgggacaaaccaggatttcctccttgtgactcttaaattgtggaaacagctgctttgcgaatgtggttctccaatgtctctcattcacaaggccacttattgcctttctattggagaagggtcaccacagagaatgctgccataatgattgg

SEQ ID NO: 29916 - DNA, 714 bp, Glycine max
  Clone ID: TF_uC-gmflLIB3275P157c04b1
cccacgcgtccgataattttactcaacgaataattgcttgtgcttcgagaaagggaaaatgaaaaagcaagattgaaagagcaggcaaaacaaaacagaaaaccgcagagcacgtcactcacaacgacataaaaaggccaagaaaaaattgagaattagaaaactaaagaacaagaagagaacaacggaaactaaacgtagtacacatcactaactctaacaagaaggaaggaaggaaggaaggaagaatcagaaagccctaatcgattttcggttattatggagagatgaaaatgaaaaggcgtgggatcagcgcggaaaggataatcgtattcgtagatgcttctctcgggaggagtgtccgatctcaaatggatcctccaattcgtattctacgcgttcgtcttggcgattggactgcacgcgcttctcaagaacaccgcctccaagtacttcgaccttgacgccactttccacgctcacgctattcctggccttctcatggaccattctctctgcgccgtttgtcgcaaccccgccaacaagaagtgttcgcgatgcaaatccgttcgatactgttcacaagcatgccagcagatgcactggaaatccgagcataaggtgagatgcaaggagtttcagggcagcagcaccagtgtgatgatgaaattggctcaaactgaagtcactaatcgagttttcaaagcttcttct

SEQ ID NO: 29917 - DNA, 564 bp, Glycine max
  Clone ID: TF_GmC154380_1
atcgcaaattatcactctcaaccctcccagaaaagggtcgttctctcttggccactggggtgctctgtcctcggctcagtcgcagattctctccctcttccccccctggcccgcgccgttctcgcttgcccgcttgggttggcgttccaggggaagtgattataagccaagagccttacgtttgtgttccaaacaactcctcggtctccccccagaaaaggtgcgatggatgtttcactacaattaataacaacgtccttagcaggtgctcgcgttgccaacttgcattctattgtggaaccgcatgtcagaggtcagagtggaagctgcatcgtcttgagtgtgaggtcctctccagcctccacaaatacaagagaaaatctctcacaccatccatacgcctgatgctcagactttatcttcggaggaagttgcaaaatgataagatcatcccaagcactgcaatggacaactacaacttggtggaggcattagtggctcacatgtctgacatcacagaggagcagctggtgctttatgcacagatggctaatcttgtaaact

SEQ ID NO: 29918 - DNA, 484 bp, Glycine max
  Clone ID: TF_LIB3242-450-P1-J1-B9
gatttgcaaagtggtctgcagaatcgcaaattatcactctcaaccctcccagaaaagggtcgttctctcttggccactagggatttctatccaggggaagtgattataagccaagagccttacgtttgtgttccaaacaactcctcggtctccccccagaaaaggtgcgatggatgtttcactacaattaataacaacgtccttagcaggtgctcgcgttgccaacttgcattctattgtggaaccgcatgtcagaggtcagagtggaagctgcatcgtcttgagtgtgaggtcctctccagcctccacaaatacaagagaaaatctctcacaccatccatacgcctgatgctcagactttatcttcggaggaagttgcaaaatgataagatcatcccaagcactgcaatggacaactacaacttggtggaggcattagtggctcacatgtctgacatcacagaggagcagctggtgctttatg

SEQ ID NO: 29919 - DNA, 483 bp, Glycine max
  Clone ID: TF_GmC142923_1
gaatgcttgccatgttaagcattggaggatttgccataaatatgaatgcgttgagaaagaagggtcacaagatcagcaggaatcaccgtttcatggaacccattgccttatcatggagcctgaaaatggtaagttctcattcagtgaagttattgagcagagatcatataagggagatgtttactatgtcgaaggaggagaaaacagtgctgaggtcagtgatgaaacagctctaaagtgtaacgatggctgtgcagtgtgtggcaatccaagctctaaagtatgctcaaggtgcaaagccataaaatattgctcacaaacatgccaacatttcgattggagatctgggcataagtttcaatgtcttgttgagaaggcaaatacaactgaaaaagcaattgtcaatcaaggaagacctgcaaacggaaatgttgtaaatctcacgaattcggatgaggtagaagataatgctcattcatctag

SEQ ID NO: 29920 - DNA, 376 bp, Glycine max
  Clone ID: TF_GmC95076_1
aagctgcaagcacaaaaggcactaagcgagaatacccgagcttgtcacacctgccagaaggaatcagacacactcctaaaatgcacacgatgcggcattagttggtactgcaataaggcttgtcaagagattggttggaaagataagggtcataaggacgaatgtcggttgctgaagaacgaaactctgaagcaaatccttctctttgactggaaacactttaaggacttcgtgcaattcccactttctgcttgagggctgctcacgggtgaaggaggttcaaagggttgttagaagcggagcttcttgtatttttttcaacattatgaagctttgtcatggactatcagattaggtatagttgatttatccgccg

SEQ ID NO: 29921 - DNA, 645 bp, Glycine max
  Clone ID: TF_GmC5789_3
ccacgcgtccgcagagattcaggaggagccagagtgagtgatacagagaaagaagaaagatttaaaattggaagaggaacaattggaaggagaaaaccctaattggaggatgtgatttattgcataatcgatggaaaaaccctagattcggagcagggggcgcaatcgacgacgccgtagatgcttgttgcggttggagcgtcgtgggatctgaattggttcctgcaattgttgctctccgtcatcgtcgtggccattggggttcactacttcgtcaaggtcaccgcttccaaatacttcttggtcgacgccaatttcgaaggggaccaccaccacgccctcgccaccgacgccatgcccggtgccctcgctgccgccgatcctctctgtgccgtctgcgccacgccagcccctaagaagtgctcgcgctgcaaagccgctagatattgttcgcaagcatgtcagcagtctcactggatgtctgggcataagacagtgtgcaaggattttcgtgagaccagtgcaagaagctcggctcataatggggtaattaatcgtggatttaaggctactgctgctgcgggtaaaagcttattaacgatggccctgatacctggctgtggagcaggagcaatttccaggcca

SEQ ID NO: 29922 - DNA, 798 bp, Glycine max
  Clone ID: TF_GmC441330_1
cgcaagtccaaacacagtttcaattccaccatctttcttcttctattcctcttttcgttttttcgtttataaattctaaaattccaaacacagttattcacacatgacatttcaccaatctctcactctgcgtcttcgagctacatatgcctcatcctctctcactctgcgtgttcttcctcgctaatctcaccggcaactacgtcaccgcccaatcgaaaagagactctttccgcgatcgcactctccgttgttactttccacgcgcccccgcggcgcgtcgcgttgccttcgctggataaatgcgtgtcaccatcgatctagggttctggagcctggtcgtcgtcgcggtggtcggcctcatcgtgccggtgatcgccttcgtcgtccagcgccagtgccagcgggcggctgccagggcagaggagattaagaggctcctcgttctcgctgaggaggagtccgtgagggccgagtcagagtcggaggcttcggtctaccagcaaaacagcatcgtttcagcaccgccgaagaacaaagtatgcgcagtgtgttactctcccaccaccacgcgctgcgccaggtgcaaagcggttcattactgttctggaaagtgccaaattgttcattggcgccaaggtcacaaagataaatgtcatcctcccagtccaacttgccagactgaggatctggtaagtgatcttggaaagaaggtagcagaaccagactatcgtggaatccatgatgagaagtctcagactaaaagcacagagtatgcaacatcatctgagaaacccc

SEQ ID NO: 29923 - DNA, 331 bp, Glycine max
  Clone ID: TF_LIB3049-052-Q1-E1-H7
ggggccgtgcagcacataatagcgtgtggtggtcggagagaagaacgggatggagtgcgcggcgaaggggagcggaggaaggtgcggcggcagcggcagcggcggtgccacaagactctgcgctcgctgcgaagccgttgcatattgctctctctctcaccagattgcacactggagtcgtcacaaacacgagtgcgataggttgcaacagcaggtgaagagtgtcgaagtcctcaataattttcccttcactttctctcgcgaatccacgtttcaggtttgtgtgaagcaggaaactaggtgttcattttttagcaagagaggccttcat

SEQ ID NO: 29924 - DNA, 3855 bp, Glycine max
  Clone ID: TF_GmC5843_1
cggctcgagcggctcgagcggctcgagcggctcgagctattctccaaataacacacagcgcaactttcgtcttctatccccaaccctaaccagttagcgaacgatcgattagagtttcgacgcaggatgagttcgaaagagcgaagccagcagccgcattcgagggttcctcgtcgtcaggagtggattcgtagagatgttggtggttgctccaatccaagaaagcccaagaagggatcatcttcgaattcgagggaggagtctaatttgcctcagctgctgcaagagattcaggacaagctcgtcaaaggagctgtcgaatgcatgatttgttatgacatggtgcgcaggtctgcgcctatctggtcttgctccggttgcttctctatctttcacctcacttgtatcaagaagtgggctcgtgcacccatttctgtggatttgtccgttgagaagaaccagggcggcttcaattggcgttgccctggttgccagtctgtgcagctcacttcatccaaggatattaggtatctatgcttctgtggaaagaggccagatccaccctctgatttgtatctcatgccacattcctgtggagaaccatgtggcaagcctcttgagagggaccttcaaggggataaggagcttctttgccctcatctttgtgtcttgcaatgccatcccggcccctgtcctccttgcaaagcatttgcccctccacgtctgtgtccttgtgggaagaaaaatattaccactcgttgctctgaccgccagtctgttcttacctgtggccagcgctgccaaaagcttcttcaatgtggccgtcatcgctgtcagcaaatctgtcatctgggtccttgtcatccttgtcaagttccaatcaatgcctcttgcttttgtgcccaaaagatggaggtaattctttgtggggagatggctgtcaagggtgaaatcagagcagatggtggagtattctcttgtggttccacttgtcaaaagaaacttaattgtggtaatcatatctgtatcgagacttgtcatccaggtagctgtggggactgtgaattattaccatcccgtattaagacatgctgttgtgggaaaactagattggaggagaaacgccacagttgtttagacccaattcctacctgttcacaagtatgtggcaagtaccttccttgcgggattcatcattgtgaagagccatgccatgctggggattgttctccttgtctggttctagtttctcagaagtgtagatgtggctcgacttcccgaactgtggagtgttgcaagacaaaaatggaaaatgagaaatttacttgtgaaaggccttgtgggcagaaaaagaattgtggaaggcatcgatgtagtgaaaggtgttgtccactttctaatccaaataatattctaaatgcagattgggatccacacttctgtcaattgccgtgtggaaagaagttaaggtgtgggcagcatgcatgtgaatccctgtgccacagtggtcattgtccaccttgtcttgaaactatatttactgatttgacatgtgcttgtggtaagacttcaatccctcctccattgccttgtggcacaccgcctccctcatgtcagcttccatgttcagttcctcagccttgttggcatccagcctctcacagctgtcattttggagattgccctccttgttcaatgcccatagcaaaagaatgtattggtggacatgtagttcttaggaacataccttgtggttcgaaggatattaaatgcaataaactctgtgggaagaccagacagtgtggtttacatgcatgtggcagaacatgtcacctccccccttgtgataatctgtcagctgtgccaggtatccgagcctcttgtgggcaaacatgtggtgctcctaggagagactgccggcatacatgtacagctccttgtcacccttcaactccatgtccagatacaagatgcaaattccctgtcacaattacttgttcttgtggccgaataacagaaaatgttccttgtgatgctggtggcagttgtgctaattatgatgctgatactgtacatgaagcttccattattcaaaagttgcctgtgcttcttcaacccgtggctgcaaatggcaaaaaagtccccctcggacaaagaaaactgatgtgtaatgatgactgtgctaagttagagcggaaaagggttcttgcagatgcttttgagattaccgctccaaatctggattcactccattttggtgagaattcggttgcttctgaattgctggctgacatgttgagacgtgattctaaatgggttttatctgttgaagagagatgcaagtttttagtacttggcaagagcagaggaaatgcacatggtccaaaagtccatgttttctgtcctatgttaaaggacaaaagagatgcagtgagggtgattgctgagagatggaagcttgcagtgaatgcagctggtcgggagccaaagcatttcgtagttgttcatgttaccccaaaatcaagagctcctgctcgtgtgctagggtttaagggtactacaactgtaaatgtaccccttcctccggcatttgatcctttggttgatatggatcctcgacttgttgtctcttttatagacttaccaatggatgcagatattagtgcattggtgttgagatttggtggtgagtgtgaacttgtttggttaaatgacaaaaatgcattggccgtttttaatgaccctgcccgtgctgcaactgcaatgaggaggttggatcatggtacggtttatcagggagctgtggtggtggttgttccaaatgtcggggcatcagtagcatcttcagctaccaatgcctggggaggatctgggacaatgaaaggaggagcactggcagcattaaagagtaatccatggaaaaaggatgttattcaagagccaggttggagagaagatgcttggggtgatgaggagtgggctactggttctgctaatgtcaaattgcctattcagaagaaagaagcccgaatatctgcttcagtaaatccttggagtgtcctaaatcaagaatcgtcttcaagttcatctgttgcagccattaaaattgatggttctaggaaacactctgaaagtagtgttatcacaaagttggagcctcgtgatggtggttcaaatctaggagggcagcctgcaggaaactttgatgctttggaagcttctgatgtagtagatgattgggagaaggcttgtgaatagcaaggagtaaacatttttcattttattttgttgagaaggaggcagattttgactagtgaaatgtctaaggctctttttgtccactagatgtatctcttttcatgttttatccccctgattttaatcaatttcgatgttattctaactagttggtgccactgttgagataatatctgacattctaccctagcttttgagactgatagaagaagggatgtgaatgtttaccacaaataggtatgttaaaactcattttataacctttatgcttatattgtactcaaattttggtttgctgtaagctctgccctcaatttgggtacacatctcaattacaaaacagttcaaagttaattttatcacaatcaattctactcaactttaatacacgggcactaaatatttataagtattaaatattattggacttggtttatcaaaacctggaggggatgggatgttgtatatgatattataagttggtggcttggctggcttccatgaaaatagattacttgaaatgtggaatggagcatatgagaaagaccaatagtttgtctcactgcaaaaggatgtcaattttgaatctctggaagc

SEQ ID NO: 29925 - DNA, 2482 bp, Glycine max
  unsure (1)..(2482): unsure at all n locations
  Clone ID: TF_GmC701_1
ccacgcgtccgtccacctcttctgcatccagagctgggctcgccaagcctccgaccttgccgccgcccgcgccgccacgcgccttcctatttcccccgccactgcctccgcctccgccctctggaactgccccaaatgcagatccgaataccccaaatctcacattcccaaaacctatttctgcttctgcggcaaaatagagaaccctcctaacgatccatggattttacctcactcttgcggcgaggtttgtggaagaccgttgaagcacagttgcggccaccattgtttgctactctgccaccccgggccgtgcccctcttgccccaaactagttaaagttcgatgcttttgcgggtgccttgaagatgttcggcgatgtggcttcaaggaattttcgtgtaacaaaccctgttccaagtttttagattgtggggttcaccgttgcattgagctttgccaccctggcgcttgccctccttgccggacacgtggagtgcacgcgtgccagtgtgcgaaggttaaagaggagagggagtgctgtgatcgtgttttccagtgtgggaatccgtgtgagaagaggcttggctgtgggaagcatgtttgtgagagagggtgccattctggtaagtgtggtgagtgtccccttaaggggaagagaacgtgcccttgtgggaaaagggtttatgaaggaatgccttgtgatgctcctgtgcagctatgtggagctacctgtgataagatgttgccatgtggctaccacaggtgccctgagcggtgccaccgtggacagtgcgttgagacttgcagggttgttgtgaagaagtcatgtcgttgtggcagcctcaagaaagatgttccttgctatcaagatttggcgtgcgaaaggaagtgtcagaggatgcgtgactgcggtcggcatgcttgtaagcggcgctgctgtgatggcgattgccctccctgctctgagatatgcggcaggaagcttcgatgtaagaaccataaatgcccttctccatgccatagagggccttgtgctccttgcccaataatggtgacaatttcatgtgcatgtggagagacacgttttgaggttccttgtggtaccgaaatggacaataagccacctagatgtcctaaaccatgtcctatcactcctttatgtcggcatgcatcaaatatcaagccacataaatgccattatggagcctgccatccttgtcggctaccttgtgccaaagagtaccaatgtggtcatacatgcaaattaaggtgtcatggtgctaagcctcctcctaatccagagtttactcttaaaccaaagaaaaagaagattatacaacaaagtgaaagtgttcctggcactccatgccctccgtgcccagaacttgtgtggagatcatgtgttgggaaacacattggagctgagagaatgatggtctgctctgataaatcacagttctcctgtgaaaatttatgtggtaatcctctaccatgtggtaatcattattgtacaaaaacctgccatgccttggagaaccagttacaaggaagccaaccttgtgaagattgttatctttcttgccaaaagagagcctgcatgtccacatcactgccctcggcgatgccatcctggagactgtcctccatgcaaggtgctcattaaacggtcatgtcactgtggtgcaatggtccatgtgtttgagtgcctatattacaacggcttgtctgcaaagggtcaagagactgtccgctcatgtggtgggccatgtcacagaaagttgccaaattgtacacatttatgcccagagacatgtcattctggtcaatgcacaaatgctgagaaatgctgtaaaaaggtcactgttcgatgcaaatgccatacattgaaaaaggagtgggtttgtcaagatgttcaagcagcatatcatcttgctggttgccatcctagggatattccaaaaaatcaatttggaattggactcattccttgcaattctgattgtaacagtaaagtgcaggttgttgagtcagaactacaattgcgtaaaactagagttacagaggtacaagagccagatgtagaaaaatcagttcggaagcggcgaaaaaggcgggaacaagttctagaatccaaggaaacttcaaaactacagaaaattatttcaagaatgaagcggcttcttctatttgtctttattttggtcatacttcttgctgctacatattatgggtacaagggacttttatggctcaatgattggatgaatgaagtggatgaacgaagacaaagatattctagaatcaaatgattatttatcagtttgattgccccctttatccaccatttttttcattagtctgattacatttttttaaggactgattacattatttttcttccctttcaatgaggatatataatgcgttaaattcaaaaaaaaaaaaaaannnnncggcgantagtagctgtgaccgggaa

SEQ ID NO: 29926 - DNA, 1304 bp, Glycine max
  Clone ID: TF_GmC701_2
ccacgcgtccggaagaagtcatgtcgttgtggcagcctcaagaaagatatttggcgtgcgaaaggaagtgtcagaggatgcgtgactgcggtcggcatgcttgtaagcggcgctgctgtgatggcgattgccctccctgctctgagatatgcggcaggaagcttcgatgtaagaaccataaatgcccttctccatgccatagagggccttgtgctccttgcccaataatggtgacaatttcatgtgcatgtggagagacacgttttgaggttccttgtggtaccgaaatggacaataagccacctagatgtcctaaaccatgtcctatcactcctttatgtcggcatgcatcaaatatcaagccacataaatgccattatggagcctgccatccttgtcggctaccttgtgccaaagagtaccaatgtggtcatacatgcaaattaaggtgtcatggtgctaagcctcctcctaatccagagtttactcttaaaccaaagaaaaagaagattatacaacaaagtgaaagtattcctggcactccatgccctccgtgcccagaacttgtgtggagatcatgtgttgggaaacacattggagctgagagaatgatggtctgctctgataatcacagttctcctgtgaaatttatgtggtaatcctctaccatgtgggtatcgttattgaaaaagtaaacctgccatacatatctaattgtgattggatgacgctttatggtgtcagatgctaaactattaactcctaaattatattgtttttcaatgttttcattaaattgaagaggtatgcttttattagtcagctctgcagtggtagtgtctactctagtaattattgaaggtacaagagccagatgtagaaaaatcagttcggaagcggcgaaaaaggcgggaacaagttctagaatccaaggaaacttcaaaactacaggtaatgttagttttcttaataaaagagctatatctatgttccaattgcctttttcttcgctgaccacttgtgaatgtaaacgttgaacagaaaattatttcaagaatgaagcggcttcttctatttgtctttattttggtcatacttcttgctgctacatattatgggtacaagggacttttatggctcaatgattggatgaatgaagtggatgaacgaagacaaagatattctagaatcaaatgattatttatcagtttgattgccccctttatccaccatttttttcattagtctgattacatttttttaagggctgattacattatttacaaatcccaaaaatgaggata

SEQ ID NO: 29927 - DNA, 487 bp, Glycine max
  unsure (1)..(487): unsure at all n locations
  Clone ID: TF_LIB3242-265-Q1-J1-F11
gctccgagccgacacggcacttttgggggatccaatttaggaaaggcagaaagacaaagagccgattaagatcgcagctatcttaagcctatctttgattgcctaataccttccaattgtagctgaagttatccgactacttcattcttgcacatgagagggattgcaggtttccacatcgcattcattactgtgattctcaagctaccgggaagagccatcgagaatggaatctgatgagcctgctgatccgaaacaaccggtgacacctcgagcttgcttgcaatgccggaaggtgaagatgaagtgcctcaaggccacacaaggcactaaatgcgctaggtgttcgcggaagtctctgcaatgtgatttccttgaacatcggcgcggcaggaagaaaggcttcaagttaaacagaacagcgtcgaaagctggactgtctactcagatctatccgagttctggcagnctccaaatgctggcaatg

SEQ ID NO: 29928 - DNA, 540 bp, Glycine max
  unsure (1)..(540): unsure at all n locations
  Clone ID: TF_jC-gmst024100g08a1
actcgctctcgcgtattcaggcgatggtagttggataagcccgtcgtatatgggtgtgatgtatctnttaggcatgataggagtcggttgctgaaagcagcgcattatgcttctccaatgaatccaggctccagagaccgttcgtggactgggttctccgagtgtctgtcaaagagaggattaaacaagttactctcctctttggacagcggcggagattcgtcttgatcttcgctatctgtggtgactcgctcgtttcccaatgccgggctccgggcagcgagggctcgcaaacgcctgttctcttcttcgagtttattgagataactggcggcttgtcaaccttgatcacgctggttcttctctctgctgacctttcatctactcgaatctttcgctctttggcagggaactgacattcctcagcccgaccgctagataaacatccgtcacacggccgtttgccggagcatttggtcttttgggaatggcatctatgacaactacataactgtattagaatattatcacgcatgtggt

SEQ ID NO: 29929 - DNA, 456 bp, Glycine max
  Clone ID: TF_jC-gmst024100c06a1
tagttgttctgcctagcacgaagggcgccggtgccaccatggccacgttctcccgtatctgcgccagtgcgaacgaatcgtaggcagaggttaaggctatcgaggcatgcagcactgctggctccgacactgacagctggaggacgagtgagctccagaaatgggacccgaatggtcgagtgagtttgtccgtcagcaggacacggaagcggtccaggcagcgcctctcctcctcagcgaggccaggaagagtccgcaggggatagaccggggagggaagtagtctcgttgacttgggctggccccagatgccatagccgtcacaggccctgccggtatccagacaccgacgacatgacggcctttgatcatcgcatttaacccgccgaaccttgcatgttcgacagcccgacctagttcggggcgtgctcttgcgcttcgccataatggcctcta

SEQ ID NO: 29930 - DNA, 372 bp, Glycine max
  unsure (1)..(372): unsure at all n locations
  Clone ID: TF_LIB3139-105-P1-N1-G5
gtcttgttcttatctttcaaagtatggttggggttcccggaaaatcaaaagcgtgcatcaattgtcgcaagcgtcgatcgcagtgtgatatgaaacgaccctcgtgtggccaatgccaaagatctggtattacatgctccggctatcagaaagagttcatcttcctgaacagcactacgcaagaagcccangacggctccttgtcgctcgagaaggagagctactcagcgggaactagaacaaggaacccaacaactgcgggttccgccgcatcgagggcagccgctacccgtacaactncggtcgttctccacgcaactcttgagcgcagtgcctacgaaaataatgtcattgatgaatttgggcatcata

SEQ ID NO: 29931 - DNA, 516 bp, Glycine max
  Clone ID: TF_jC-gmst024100a04a1
acgacaccttcttcaccaccggtcaatatttttttccgttctcgtagttctgcagcccttttctcgagccgttcacagtatgcctccagagatccaacatagcttctttcttttcctcggggaaattcatcgctgctggagcaggtatccgcttttcctgctctttcgcaagccgaacaagccgggagtttcccgtcgcatctgatcttggcggttcggcatcttgagcatgcggcgactggccgactgactttgagcagcggtctgtccaaaaacgaggaattggacattctaactgtacatgttccctatcgagttcatatcagtgtggagctagcatgatgactcggcagtgtttcacgaaatagtcttcagatacaggctgagtttcatgtgaactcagtccgtgaaagctaggaatcaatttcctcgttaacagtctctaacgctaggaagatttttatgttgactgattaaaagtaagagttactcaccacttcaactgtgtgcttcact

SEQ ID NO: 29932 - DNA, 1477 bp, Glycine max
  Clone ID: TF_GmC991_1
aggagatgagcgagcgtgatgtgccggtgtccgattctggtagtggagttcctaaaagaggggttagtgaattaatggaggttcgaggagattcggacacttcaattttgtctttctctgagtttttagttatgtttgacgatccagattgggaggttggcatcatgcctggactggtgaagcttgaaaccggggattcaaacaggcatggtgacacggtatgctcggttttgtggtacccctccggatagtctcaatttaaggagatatgatgcacttttagtttgtgtaaccaatgctaaaggtgctaatattaggaaatttgatgtcactgtatacatcaaggttttaagggctgtggatctgcccggccagccggttagtgaattaatggaggttcgtggagattcggacacttcaatggtgtctttctctgagtttttagttatgtttgacgatccagattggggttttggcatcatgcctactctggtgaagcttgaaactggggatagaaataggcatggcgacgtggtgtgctctgtttgccgctacccaattattggttctcggtttaaggagataaaatctcattttagtttgtgtaaccaatgctacagtgagggaaaagtgccttcttcatttaagcaggaagagtacagatttaaagagtatggaagtgagggtgaagccatgaaagataagtgtatgtgcttcaacttgcaatcccgtaatgaaaagtagatagcggcattcaattttttgtctttagatttttttgttctactatcttgtattatcccatcttgtttatcctagcttttcaggtgtgaatgtgattataactagagctcatgagttcagcaggcattttggccccttgtttaataattgtttcaggtggtgcttcactgctctttagtaactgtttatagacattgtaaaacctttaacctccgtgacaaacatttgtgtttatcatgcttctttttatcccttctttctgatttgtatgaagcatttatcttttgacacatgaagcctgaaaagtaagtctagagtactgtgattctaactttcaattatatttgtagtattcaacggaggagtggtcaatttttcccccttgttacgttagattttgtttatacgctttaagtaccatgagtacaatacattcaatggtttatatttcacctcaattttaatctgtcagtacatttaactctgctttgaactttcatttgtttccatatggttaatttgatgtgatgcaatgagagtatacaagaattttgaacagtagggactttgcggttttgtatttatatattcacgaatttttccatctcttcatccatctcttcatcaacagtacaatcagtggcggttctaccatgcggccagcaggggcatatgcccgggctcagctaggcattttttttggttacaagcccaatatttttttattagtctt

SEQ ID NO: 29933 - DNA, 417 bp, Glycine max
  Clone ID: TF_LIB3030-004-Q1-B1-E8
aaccactctctcataaaatcaaagactcatacatacaataaatacacaagtaattaacacagccatgaaatacaatgagatatcccatttcagccacactgaacacaagctgagattcgagtactcagaattccccttcaaatgtgatggctgcaaggaagtaggcatagggtcacgttacaaatgctccatctgtgacttcgaccttcacatgcactgtgccatgataacctccccgaccttgcaccaccctttctacaccaaatgcaacttccagttcatgtcaaagccaccgggagacacgcctcgttactgcaacgcgtgcgagaaggacgtgagtggcttcttgtaccactgcaaagcgtgcggcttcgacctccaaccgtgttgcgccaagctaccgttgctccttgatga

SEQ ID NO: 29934 - DNA, 2979 bp, Glycine max
  Clone ID: TF_GmC14821_1
cacccatcagcgtccggcgtccgctttcagcttgtccatctatccccaaattctgttccgaagaagaagcctcgtctcggataagggttagggtttctgtgttttctctttcttccgtgtaacttctacgtttcccttcgtcgctccaagagctatggactctgctctagtgatcaaggtgaaatatggagataccctcaggcgcttcagtgctcgtgttgatgagaataatcggctggaacttgacatggttgacttgagggcaaagatatgttctatcttcagtttcagtgctgatgcaaatttaattctgagatatgttgatgaagatggtgacttggtgactctagttgatgatgatgaattgcgtgatgtgatgaggcagcaattgaagttcttgaaaattgatgtacacatgaacaatgacagtgggggtaaatcaaatgctgggtctagtggaagtgccacccccatagaatcttgtcctgcctcaagcccatttctgtttagaaatgctatgctacgtgaacatctttctaaaaaagcagcatcttcaagtcctgtggttgataatcttgctgattcaattttgaaaatgggactaatttcccatttcgagcctcctgatacagctggtaaaagctcaaaaactggtgttcctgaagaacctatcactaaagcaatgggtccacaatcttcacatgtggactcagcctccaatgctagtgtcaatagtgatagtgctacccccataagatctccaattccaaacccttatctaagtggaaatgctgttaaagttgacgtctcatgttctgtgcccgaaccagtacgccagttttttttccaaatcatcaagttcaaatgctgctgcgtcttcaagtcagctgcctgcaaatctcgctgatttaatttccctagtgcctgaaccagtacgcgagtttctttccaatttatcacattcaaatgctgcatcttcaaatcagctgcctgttaatctcactgatttagtttccctactgggacaatctattctaaattctcattgccagcctcatgttgcaactggtccattcacaaaaaatggtgttcctgaagaacctatcacttctgaagcaagaggtcaacagatcccatctgcagactcggctttcaatgccactcaacaagtggaggcaggagttgcccctgttgatctcaatgtccctccttttgatccttttttagctcagttcttccctgatggtgatggcaagaagggtgaaatgccggctgtcgatagttctgctggtaaggatgacagtagtgggatatgctcaagttttgctggtcctaataacattcaacccagactacatcattgacttctggtgctttcattgaatgcccatttgctgggacatatattaattcttggacaccacttcctggaaactctcaaatgcccccatttaaaaggagccatagtcacactgatgcaatgtctggtatgttccataagggggtccgctgtgatggctgtggtgtctatccaataactggacctcgtttcaaatccaaagtaaaggaaaattatgatctttgcaacatttgtttcaatgaaatgggtaatgggacagattatatcagaatggaccgccctgcatctgctcgggcccctcgatacttacatggacatacaaaaaactttccaacattaccaccacatatttttaagaaaggtgccattttgaagcatgcaaagccaaaactagatagtaggtttattttggatgttaatgtgatagatggtacaatgatggctccatctactgcatttacaaagatctggcggatgcgcaataatggcactatagtctggcacaagggaactcaacttgtttggattggaggagacaagtttagtgactctcattcagttgacttagaggttcctgaggatggtgtccctttggagaaggaacttgacattgccgttgacttcacagcacctccattacctggtcgatacatatcatattggaggatgacaactccatctggacataaatttggccaacgtgtttgggtccttatacaggttgatgcatctctccaggactcattttatgatacctctcaaggtctgaacttgaatattccccttgatatcagtggctctaaaggacctcagattatagatatcaatgtccagcctactgaggaagatactgttcttcaaacccgcaatcctaatgctcccattgagcctgtgaatcaaatggttgataatgaaccaaggtttgagctggaaaatgaattccctataaatgaagctacatttgttggccctgctgcctcagcccctgctgcaacccctgtggcatcttcatcagtttcttatcctattattgatttatctgaaacaaccccagctgttccatctaatcagcaatcctcaactgtggatgtgccttcatcatctatggggactggtggaattaattctgtggaggagagtctacttaaagagcttgaggagatgggttttaaacaggttgatttgaacaaggagatcttgaggaataatgagtacgatctgtaccaatccctagactttctctgtggtgtttctgagtggtagtgggaccatccatttgcttgcagagttacgggagatgggttcccgtgacagagatgaataagaggctgcttgagaaaaacaatggaagcctcaaacgtgttgttatggatttaatcaacggcgagcagtattttagttgaaatgttagttaatagtagtttatgtaaaggtggcgacttgggcttctttacagtttaagccttgttattttgatttatatatcttatttcctatctcgatcttgagttgtggtgattcatcacaattgaacaatttgatctatcctatgtttggatttaagtatgttatgaactcaaaagtatatagcttaaaaaaaaaaaaaaaaaaaaaaaaaa

SEQ ID NO: 29935 - DNA, 472 bp, Glycine max
  Clone ID: TF_GmC90028_1
aacaagttctggtcactaacatcatcagctgtgaactgaaattcatttccatctcccactgagtccacttctatcggaattgctgtcataggatgatctctagagtgtggtggaggaagacgatctgcatctggtacttcatagcaagcctcacacaagtcaaaatcaggacaaacagtacaatgccatctccgcctttgtataggtactgtagagcaaccatcacaacaatattggacagatgaagtaatagtatcgtcctcaatcatgatttggttatttccagtacttgggtcagcagggccaggaactgacaccacactctcaacagcatcatctgtagccaacatggtttgctttggaaaagggacctgaagcaatcttgaagatatggccaaactggggaggaaatgtgtgaaaacgtgaatatcaaattcagagccaaaaaaaaaaagtaagctaaaatacctgc

SEQ ID NO: 29936 - DNA, 1142 bp, Glycine max
  Clone ID: TF_GmC4344_2
atacattctttgacactagacaggcatttctgagtctctgccagggaaatcattaccagtatgatacactaaggcgggccaagcattcctcaatgatggttctctatcatcttcataatccaacggctccagcatttgtgacaacttgcaatatatgctatcttgacatagaaactggtcaaggttggcgttgtgaggtttgccctgagtatgatgtatgcaatgcttgttatcaaaaggatggaggtattgatcatcctcataagttgacaaatcatccatccatggtggaccgtgatgctcagaacacagaagcaagggaggttcgagtagtgcagctacggaaaatgcttgatctccttgttcatgcatcccaatgtcgttctgcacattgccaatatcccaattgtcgcaaggtgaaggggcttttccgccatggcatgcactgcaaaacacgggcttctggaggttgtgttctttgcaagaaaatgtggtatttacttcaacaacatgctcgtgcttgcaaagaatctgaatgccacgtaccacgttgcagagatttaaaggaacatctaaggaggctgcagcaacagtctgattcacggcgtagagctgctgtgatggaaatgatgaggcagagagccgcagaagttgctaacaatgctggatgagcaatttatacttgtaaatatgtggcactttgaagaaatgctctagacagaggtataccttagtttcacctatgctccgacagcagtgattgtttttgtgaatggaatacgtagggtacatgtagccttgcgtccatctcgacatctttgtcccagaaaaagatctgagttcagccatttagtgctgctgtcctcttctgcaaaggactaacaaggtccggcggggatatttggtggttcgtctgtttttgtaattctttgattttgttaagttacttgttttatgtcagatgccattcttcggtggcgggtgtactatagtcctaaataggtcacaaatttcttacaaatctgtgggagtgagggagggagggatgtcatcaagtcgtttttagttgaccgttttaaagattcaatgcattttgtagaatcttttatttaaagatgaaagtaaataattagaatatgcgc

SEQ ID NO: 29937 - protein, 103 aa, Glycine max
  Clone ID: TF_11274280.pep
ADSSREENVFMAKLAEHADRYEEMVEFMEKVAKTVEVEELTVEDRNLLYAAYKNAIAARRALPTTTSSIDRKEETPCAEDHLAMVEEPSGTLAAYIPAICRVR

SEQ ID NO: 29938 - protein, 54 aa, Glycine max
  unsure (1)..(54): unsure at all Xaa locations
  Clone ID: TF_LIB3170-033-Q1-K1-B1.pep
QFVYLAKLPEQAVRNEEMEDFMHNDAVEWTPATXLTVDDHNLLSVAYKNENGSL

SEQ ID NO: 29939 - protein, 140 aa, Glycine max
  unsure (1)..(140): unsure at all Xaa locations
  Clone ID: TF_LIB3106-074-Q1-K1-A6.pep
EKERERVRNCFKFANPKFGKGGYGCLQGSRELRLHRQARRTGRAILSDSGINAERSATRRRTNCKAAKDPNKPKRPPSAFFDFMDDFKNVFNIXHPENKSSSAVGKATGAKCKTMSDAEKAPYVAKSDKRTVEHEKIMPA

SEQ ID NO: 29940 - protein, 96 aa, Glycine max
  Clone ID: TF_LIB3167-080-P1-K1-C4.pep
KGKGSNPGQYKAYPGFGTFFMNSTLSLERSACPAHFAKGTFPSRGGTGLFQIPGSRRLYPKKWKIPVWKGVTEREPLKEKKVGPLTRTGVVRPRNS

SEQ ID NO: 29941 - protein, 104 aa, Glycine max
  Clone ID: TF_LIB3242-758-P1-K1-F4.pep
YRTLSKILRVLKIEHKEAWALGIQHHITDCQPLYELRRFLIWHKEMAFRVNLHERKYTTHQTYQGYQGSFRWSWTSYGQRVRLAAKRCIMCVLSLTVFCFKVCS

SEQ ID NO: 29942 - protein, 86 aa, Glycine max
  unsure (1)..(86): unsure at all Xaa locations
  Clone ID: TF_10847191.pep
ELTIEERILLSVPYNNVIRARRASWRIIFSIXHKEESRGHXDHLFLILYYRFKIYSYLCNICHRMLKLLHCFLIPSTSSGYFKVLY

SEQ ID NO: 29943 - protein, 74 aa, Glycine max
  unsure (1)..(74): unsure at all Xaa locations
  Clone ID: TF_700977595H1.pep
FAEXKXRRXPGKXAAXRRFXRLPKXFKDIDNXELXLNSXLXGWVCSEFSVXYYXILNSXDRACRLXKXALXKXL

SEQ ID NO: 29944 - protein, 126 aa, Glycine max
  unsure (1)..(126): unsure at all Xaa locations
  Clone ID: TF_GmC1228_5.pep
MPAEAELPPTHPIRLGLALNFSVFYYEILNSPERYDFYFIFLTVLLFKCQPLCVLCAXVGPCLTNLTPYSSYLRACHLAKQAFDEAISELDTLSEESYKDSTLIMQLLRDNLTLWTSDIPEEGGIH

SEQ ID NO: 29945 - protein, 135 aa, Glycine max
  unsure (1)..(135): unsure at all Xaa locations
  Clone ID: TF_LIB3040-008-Q1-E1-D4.pep
RSRITGLTHASGENTTARKSVLGAPRSSWRILSSIQHHAYTNGNYLSANQHIEYIRTVELDLAIICCDVMIVIDEHLMPSAATGESTVFYYHIIRHYYRYLAKFQSSPDTNEAADQSTIASESATAAXQADLPPT

SEQ ID NO: 29946 - protein, 77 aa, Glycine max
  unsure (1)..(77): unsure at all Xaa locations
  Clone ID: TF_LIB3108-043-Q1-K1-D1.pep
KNFFEPPRPLWPLFSLFDQKGETPGTGFNISIFRNYRSKILSNFSNFXNVFLKLLNFRLIQSVFSGISKVFSFKLKG

SEQ ID NO: 29947 - protein, 182 aa, Glycine max
  unsure (1)..(182): unsure at all Xaa locations
  Clone ID: TF_uC-gmroLIB3259P150a03b1.pep
MASAPTPHKEIMYMAKLAEQAKRYKDMAEFMETVSSSVESXELXVEERTLLSVPYNNEIIARQSSWRIMCLIEQMEESRXTNDHVASSETSRPRSKPSSXNICDGMLKLLNTRLVRCDDCGDYKDFYLMMKADYHMHLAEFKTGSNPREADQSTLSCYTASHDIAHTELPTTDPMRLRLALN

SEQ ID NO: 29948 - protein, 116 aa, Glycine max
  Clone ID: TF_uC-gmflminsoy062f07b1.pep
VFFSLGSFFLVICGLVAPRGPSCAVRIFVSRCRVGSFLPLFVLGRVFASFFVRSPFLRFCGPARLVWPGVLGSLSLFRRAWFLCAFSLPAAGCVRGLPFKGSPWGSVSSWVGCLFG

SEQ ID NO: 29949 - protein, 172 aa, Glycine max
  unsure (1)..(172): unsure at all Xaa locations
  Clone ID: TF_LIB4200-001-Q1-K1-H5.pep
ENIDTAKLAXKTARYEEMVVFMAKXNTVVAEVLTKEERNLLCVSYTNGIDTXRALWMIMSSIVLQDESIGNVDHVVIIKEDRCVNEGXLIMNCDGILNLLESNLIPFIAFPDSKIHFLEMKGDSEETLAQFKTGAETKDADESTFIADRXSHDIAFVDLAPTHPIRLGPALT

SEQ ID NO: 29950 - protein, 107 aa, Glycine max
  unsure (1)..(107): unsure at all Xaa locations
  Clone ID: TF_10842944.pep
HLPHEENVYIDKLAVQAECYEXMVEXLERVSFGADNNELTXEEMNLFLPACWNVIRARRAWWLIISSIEQKEESLSHHDHVSGMLHYRVMIVSELCNICDVVLKLLD

SEQ ID NO: 29951 - protein, 131 aa, Glycine max
  Clone ID: TF_uC-gmroLIB3259P238b03a1.pep
KKKDSPKRAPPLAKQAFYGAIWGLGPPREGSYKGPPFFKQLFKNNPTFWASDFPKGGGGGPKKAEKAQPFGPEPLCGSGVKNLRGSPKGPFSAFFPKDLGPPKRTGGAHSKILVFFKIFSQARRLAPLFFP

SEQ ID NO: 29952 - protein, 38 aa, Glycine max
  Clone ID: TF_LIB3051-099-Q1-K1-H7.pep
FQKEGAHNTLSTYKAAQHIPNTELPPTHPTTLNLALNY

SEQ ID NO: 29953 - protein, 62 aa, Glycine max
  Clone ID: TF_11413695.pep
YHFDCKTRPARIEGGESTLCAYRAVQDIANTVLTTTHPIMLGLALNSSVFDYDILISTARAC

SEQ ID NO: 29954 - protein, 179 aa, Glycine max
  unsure (1)..(179): unsure at all Xaa locations
  Clone ID: TF_12488454.pep
NVYMANVAEQAERYLXMVEFMEKVSAAADNXELTVEDRNLLSVDYYNVDRRRPXALCRIISSIDQKEESRGNNDHVYVILDYRSKIESXELSNMCNGILRLVDSHMMLSAFCGDSKVCYLKMKEDDHRYLAEFMSGAKRREASDSTLSACRVAQHDANARSDATASDKRGHALDYMYET

SEQ ID NO: 29955 - protein, 250 aa, Glycine max
  Clone ID: TF_GmC548_1.pep
MAGAEGLNREQYVYLAKLSEQAERYEEMVEFMQKVVVGWTPASELTVEERNLLSVAYKNVIGSLRAAWRIVSSIEQKEEGRKNDDHVSLVKHYRSKVENELTQVCASILNLLDSNLVPSVFASESKVFYLKMKGDYHRYLAEFKVGDERKTAAEDTMLSYKAAQDIASGDLPPTHPIRLGLALNFSVFYYEILNQSDKACAMAKQAFEEAIAELDTLGEESYKDSTLIMQLLRDNLTLWTSDVQDQLDEP

SEQ ID NO: 29956 - protein, 290 aa, Glycine max
  Clone ID: TF_GmC548_2.pep
MLSQSFSKCFFIHKIHSFGFVPLPPIAAILLASKSEQEKRMAGAEGLNREQYVYLAKLSEQAERYEEMVEFMQKVVVGWTPASELTVEERNLLSVAYKNVIGSLRAAWRIVSSIEQKEEGRKNDDHVSLVKHYRSKVENELTQVCASILNLLDSNLVPSVFASESKVFYLKMKGDYHRYLAEFKVGDERKTAAEDTMLSYKAAQDIASGDLPPTHPIRLGLALNFSVFYYEILNQSDKACAMAKQAFEEAIAELDTLGEESYKDSTLIMQLLRDNLTLWTSDVQDQLDEP

SEQ ID NO: 29957 - protein, 74 aa, Glycine max
  unsure (1)..(74): unsure at all Xaa locations
  Clone ID: TF_700744868H1.pep
HGGFLLGRRSFTWRPGEXVRYEDIVEFLEKVAKIAEVDELTVEERNLLSVAFKNVIGASRASWRIISSIEQKEE

SEQ ID NO: 29958 - protein, 60 aa, Glycine max
  unsure (1)..(60): unsure at all Xaa locations
  Clone ID: TF_LIB3028-005-Q1-B1-B10.pep
MAASAHTPSKEFVYMAILADHAHRYXEMVEFMRKVSASADNHELSVEERNLLSVGEHNFI

SEQ ID NO: 29959 - protein, 144 aa, Glycine max
  Clone ID: TF_9204460.pep
AAAPSPNEENVYMAKLAEQAERYEEMVEVIENDSAAADNEELTVYERNLLSVTYKNVIGARRTSWRIISSIDHKEESHSNDDHVYVIRDYRSKIYSNLSNICDSILKLLNCLLIPFASSYEFKVFYLDIKADYPQYLIKFKTST

SEQ ID NO: 29960 - protein, 147 aa, Glycine max
  unsure (1)..(147): unsure at all Xaa locations
  Clone ID: TF_LIB4164-027-Q1-K1-A12.pep
PLKDRENFVYIAILVYLAVRFXEMAESMRSAANIPIRTXTAEERNLLSVEHKTATSARTETXRILTCIEQKGETKGNXLYATWTKDSRQEGESKLSNIXDEVXMRASDEHFITAGVRGESTALNYXTTGEYDWDRAECKSSKEKKEA

SEQ ID NO: 29961 - protein, 54 aa, Glycine max
  Clone ID: TF_uC-gmflLIB3260P031c03b1.pep
PTRPFTRPPTRPKDSTLIMQLLRDNLTLWTSDIPEDGAEEQKVDSARAAGGDDA

SEQ ID NO: 29962 - protein, 62 aa, Glycine max
  Clone ID: TF_701044857H1.pep
MAARAPIPREEFVYMANCPEQAERYEEMVEFMEKVSASAESEELPVEERNFFSVAKKNVLGA

SEQ ID NO: 29963 - protein, 77 aa, Glycine max
  Clone ID: TF_GmC418_4.pep
YFVFQDIANAELPPTHPIRLGLALNFSVFYYEILNSPDRACNLAKQVRFRYSEYLGLCFALFIFVLQHFEQCFGCFP

SEQ ID NO: 29964 - protein, 101 aa, Glycine max
  Clone ID: TF_5688049.pep
ASAPSPREENVCMAKLAVLGERYEEMEASMEKVYADVDNQERTAEEMNHLCVAYKNEIGARRASWRIISSIEQNEESRGIDDHMYVNRCYLFKIQSELSSI

SEQ ID NO: 29965 - protein, 218 aa, Glycine max
  unsure (1)..(218): unsure at all Xaa locations
  Clone ID: TF_LIB4203-002-R1-K1-G1.pep
MDKNELVQKAKLAEQAERYDDMAACMKSVTEQGAELSNEERNLLSVAYKNVVGARRSSWRVVSSIEQKTEGAEKKQQMAREYREKIETELRDICNDVLSLLEKFLIPNASQPESKVFYLKMKGDYYRYLAEVAAGDDKKGIVDQSQQAYQEAFEISKKEMQPTHPIRLGLALNFSVFYYEILNSPEKACSLXKTAFDEAIAELDTLSEESYKDSTLIM

SEQ ID NO: 29966 - protein, 263 aa, Glycine max
  Clone ID: TF_GmC518_1.pep
MATFSKERENFVYVAKLAEQAERYDEMVDAMKKVAKLDVELSVEERNLFSVGYKNVVGSRRASWRILSSIEQKEDSKGNELHVKHIRDYRNKVELELSNICSDIMIILDEHLIPSTNIAESTVFYYKMKGDYYRYLAEFKAGNEKKEVADQSLKAYQTASTTAESELQPTHPIRLGLALNFSVFYYEILNSPERACHLAKQAFDDAVSELDTLNEDSYKDSTLIMQLLRDNLTLWTSDIPEEGEDLKMESAARVDQGEDELGR

SEQ ID NO: 29967 - protein, 86 aa, Glycine max
  unsure (1)..(86): unsure at all Xaa locations
  Clone ID: TF_700681991H1.pep
DIAHADLAPTHPIKLSPALNISVLYYEILSTPDRACNIANQASDEAIAALDIPXEEYHKDSTPIMQLLRDNITXWSADTNEDGSDD

SEQ ID NO: 29968 - protein, 88 aa, Glycine max
  Clone ID: TF_LIB3094-060-Q1-K1-D9.pep
MSIKFYNIQSSGKKKGTMSERAPTTLEQVVYMAKLAEHAKRHEEKVEHMANDCNYSESEELTREHHNREWAYYKNVVLSQRAYEFIML

SEQ ID NO: 29969 - protein, 248 aa, Glycine max
  Clone ID: TF_GmC518_2.pep
MCLSGGVWCAEMVEAMKKVAKLDVELSVEERNLFSVGYKNVVGSRRASWRILSSIEQKEDSKGNELHVKHIRDYRNKVELELSNICSDIMIILDEHLIPSTNIAESTVFYYKMKGDYYRYLAEFKAGNEKKEVADQSLKAYQTASTTAESELQPTHPIRLGLALNFSVFYYEILNSPERACHLAKQAFDDAVSELDTLNEDSYKDSTLIMQLLRDNLTLWTSDIPEEGEDLKMESAARVDQGEDELGR

SEQ ID NO: 29970 - protein, 225 aa, Glycine max
  unsure (1)..(225): unsure at all Xaa locations
  Clone ID: TF_LIB4203-002-R1-K1-E7.pep
MGDREQLLQRARLAEQAERYDDMASAMKAVTELNEPLSNEDRNLLSVAYKNVVGARRSSWRVISSIEQKTMADGNEKKLEKVKAYREKIEKELETVCNDVLALLDKFLIKNCNDFQYESKVFYLKMKGDYYRYLAEVASGEKKNSVVEASEAAYKEAFEISKEHMQPTHPIRLGLALNFSVFYYEIQNAPEQACLLAKQAFDDAIAELDTLNEDSYKDXTLIMQL

SEQ ID NO: 29971 - protein, 259 aa, Glycine max
  Clone ID: TF_GmC1228_1.pep
MASTKERENFVYVAKLAEQAERYEEMVEAMKNVAKLNVELTVEERNLLSVGYKNVVGARRASWRILSSIEQKEEAKGNDVSVKRIKEYRLKVESELSNICSDIMTVIDEYLIPSSSSGEPSVFFYKMKGDYYRYLAEFKSGDERKEAADHSMKAYQLASTTAEAELASTHPIRLGLALNFSVFYYEILNSPERACHLAKQAFDEAISELDTLSEESYKDSTLIMQLLRDNLTLWTSDIPEDGAEEQKVDSARAAGGDNA

SEQ ID NO: 29972 - protein, 75 aa, Glycine max
  unsure (1)..(75): unsure at all Xaa locations
  Clone ID: TF_uC-gmflminsoy059f05b1.pep
MSDFSLKENDYRAKLXRSRAERYEEMVEFIEKVAKTVXGEELAVEERNIIYVAYKSLMDAMRALWGIIYYIKVIE

SEQ ID NO: 29973 - protein, 313 aa, Glycine max
  Clone ID: TF_GmC1521_1.pep
MESKWGGAPASIMAANFDDFKWIASMFDPGNDDVKPFSDAAFQNQDAVTAFSTCGGVTDDTLVRSQNLTPIQSTISATIDSQSSFCGTVGSPVSANKPNVRDNQVKGVATTTSGSSREPSDEDDEAGPCEQSTNAIDMKRLRRKVSNRESARRSRRRKQAHLADLEWQVERLRLENANLFKQLTDASQQFRDADTNNRVLKSDVEALRAKVKLAEDMVTRGTLTPINNQILQNQSSLNTPPQLNTNNLHRMTHVSPTITVRGNDDASYGGGITVSGQNSPLGGLGNLDNIPCSDFNSGINSNNAVSSMTSMWP

SEQ ID NO: 29974 - protein, 72 aa, Glycine max
  unsure (1)..(72): unsure at all Xaa locations
  Clone ID: TF_700977467H1.pep
MXSTKXREXFVYTAKLAEQXERXXEXVEAMXNXAXVNVXLTXXEPXLLSXXXKNXVXARXAXWXXXXXXXHX

SEQ ID NO: 29975 - protein, 110 aa, Glycine max
  unsure (1)..(110): unsure at all Xaa locations
  Clone ID: TF_LIB3094-072-Q1-K1-C6.pep
SLIHRSSHASALSLTHTISLSFSHPDLVTRAMSTTPREKVTYMAKHTDHANRYXEMMKLMEKVSAYNDSHELTTEEHNLLSVNYKNVISARHAYXRIISIIEHKEDKRVN

SEQ ID NO: 29976 - protein, 119 aa, Glycine max
  Clone ID: TF_uC-gmroLIB3259P229h02b1.pep
VKHIFGREGNGRENVRPVSGEQEVHKGPSVREPAHQERPAEKERKTQGYLAKLAEQAERYEEMVECRKKAGTLVPDLTAEDRNLLSTGYKNVTGAPRASWSMTPSIEHTDESKGNERTV

SEQ ID NO: 29977 - protein, 62 aa, Glycine max
  unsure (1)..(62): unsure at all Xaa locations
  Clone ID: TF_LIB3242-657-P1-J1-H5.pep
DRENFAYICKLSEXPAFQEMVESMKNXANLCIVLSGEERNLLSVGLTNMIGARRARWRILSS

SEQ ID NO: 29978 - protein, 88 aa, Glycine max
  unsure (1)..(88): unsure at all Xaa locations
  Clone ID: TF_jC-gmXLIB3563P78cg03a1.pep
FGSSARALPERIHLPSLEQNGERGRGNRGPRQPSFRDYRXRSRAELSNICDGMLKLLDTRLVPSAASGDSKVFYLKMKGDYHRYLAEF

SEQ ID NO: 29979 - protein, 101 aa, Glycine max
  unsure (1)..(101): unsure at all Xaa locations
  Clone ID: TF_uC-gmroLIB3259P231f05a1.pep
PPPPNRGGPALNFPGFKXRIFNFPGGGGNPAKQAFYRAIVNMDTLGEGSYKEGPLFNPRGSDNPPPWTFDKQGDGANKIKKAPPQGGGGQKLTNPTRGVRP

SEQ ID NO: 29980 - protein, 92 aa, Glycine max
  unsure (1)..(92): unsure at all Xaa locations
  Clone ID: TF_LIB5118-006-B1-PF1-D4.pep
MEDAPSPREKNVYMANIAQQAERYEKKVELMKKVSSFXNTHHPTGEERNRLSVAYKNEMEERRASGEIFSSIXQKEESHAKXDHDAVIREYR

SEQ ID NO: 29981 - protein, 53 aa, Glycine max
  unsure (1)..(53): unsure at all Xaa locations
  Clone ID: TF_LIB3242-769-P1-K1-A8.pep
QTRGQTRGVEFMEKVFSSSRSFXLTVEDLNLLSVNYKNVIGTRRASCNIIFSI

SEQ ID NO: 29982 - protein, 72 aa, Glycine max
  Clone ID: TF_LIB5118-021-A1-PF1-A6.pep
RPLRRRADSHILLVPSSHNLHSTHHHSHRDHRMVGAKSLLPHTAHIPCEAVGAGGAVRSYGRRSWIMLSSDA

SEQ ID NO: 29983 - protein, 60 aa, Glycine max
  Clone ID: TF_LIB3049-054-Q1-E1-A8.pep
MSDSSRDENVYNAKLADHVDRYDEMVEFMDNVPDTVEVEELTVDETNLLSVAYNNVIGAM

SEQ ID NO: 29984 - protein, 124 aa, Glycine max
  unsure (1)..(124): unsure at all Xaa locations
  Clone ID: TF_14991060.pep
GNFSRILEKFKVGNEKKKGANQPLKAYETLSPPVERELHPTLPIRWGRVQNSPGFNKKIMNPPERAGLLAKQAFNNVASNLNPLKEDPSKARPLIMQLLRNTLXLXTSDIPKKVEAQKLETPPR

SEQ ID NO: 29985 - protein, 42 aa, Glycine max
  Clone ID: TF_LIB3094-073-Q1-K1-C4.pep
KVSDYFEYQNLTDNARNLLSLSYQNCINATLASPLIICSIYL

SEQ ID NO: 29986 - protein, 73 aa, Glycine max
  Clone ID: TF_700755182H1.pep
LTHTFSLSLSHPDRVAIASAPTPRAAFVYMAKLAEQAARYEEMVDFMEKVTASAERDELTVEERNLLSVAYKN

SEQ ID NO: 29987 - protein, 101 aa, Glycine max
  Clone ID: TF_LIB3242-403-P1-J1-G11.pep
IRLELTHTLCIYLYQPDLVATASAPTPREELVCMAKLAEQAKRYKETVEFMENVCSSAESEELTVEERNLLSVDYKNVNGARRAYRRIISLIEQKEESRGI

SEQ ID NO: 29988 - protein, 69 aa, Glycine max
  Clone ID: TF_8282709.pep
HMSVIRYYRSKIVAVLYNVYYGILYLVDTLLVHFVVYGDFKVLYLKMKGDYHRYLVEFKTVADLNDAAE

SEQ ID NO: 29989 - protein, 101 aa, Glycine max
  Clone ID: TF_jC-gmro02910042d09a1.pep
MLWLEMVEAMKNVAKLNVELTVEERNLLSVGYKNVVGARRASWRILSSIEQKEEAKGNDVSVKRIKEYRQKVESELSNICSDIMTVIDEHLIPSSSAGEPS

SEQ ID NO: 29990 - protein, 73 aa, Glycine max
  unsure (1)..(73): unsure at all Xaa locations
  Clone ID: TF_uC-gmropic116f05b1.pep
NEETXEPTEKXAKXXEAEEPTXEERXXXXXXNKNXXXARRXXXRNXXPXEQKEESRGXEDHXAXXKEXRGKXE

SEQ ID NO: 29991 - protein, 259 aa, Glycine max
  Clone ID: TF_GmC1228_2.pep
MASTKERENFVYTAKLAEQAERYEEMVEAMKNVAKLNVELTVEERNLLSVGYKNVVGARRASWRILSSIEQKEEAKGNDVSVKRIKEYRQKVESELSNICSDIMTVIDEHLIPSSSAGEPSVFFYKMKGDYYRYLAEFKSGDERKEAADHSMKAYQSASTTAEAELPPTHPIRLGLALNFSVFYYEILNSPERACHLAKQAFDEAISELDTLSEESYKDSTLIMQLLRDNLTLWTSDIPEEGAEEQKVDSARAAGGDNA

SEQ ID NO: 29992 - protein, 395 aa, Glycine max
  unsure (1)..(395): unsure at all Xaa locations
  Clone ID: TF_GmC1521_2.pep
MVKETEYYDVLGVSPTASEAEIKKAYYIKARQVHPDKNPNDPLAAQNFQVLGEAYQVLSDPAQRQAYDAHGKSGISTEAIIDPAAIFAMLFGSELFEEYIGQLAMASMASMDIFTEGEQFDSKKLQEKMRVVQKEREEKLAEILKNRLNQYVQGNKEGFVNDAEAEVARLSNAAYGVDMLNTIGYIYARQAAKELGKKAIYLGVPFIAEWFRNKGHSIKSQVTAATGAIALIQLQEDMKKQLSSEGDYTEEELEEYMQNHKKLMIDSLWKLNVADIEATLSRVCQMVLQDNGAKKEELRARAKGLKTLGKIFQRVKSANGNENESVXNKAVHKLNGSETGNDTSPSTSPKSSSPDFSSQSPYVEAPRFAGMQFDYNFPRPTAPPGAQRPTSTSKD

SEQ ID NO: 29993 - protein, 109 aa, Glycine max
  unsure (1)..(109): unsure at all Xaa locations
  Clone ID: TF_jC-gmst024131g06a1.pep
LELRCSIHLRWFCRTTRKGYLHYRAVTPREEIMYMAKLVVPAQRYEEMVGYKEIGLRLKXSEELTVEERNLLFVXLRNVIWARRAFWRIITSTVQKGESRGDEEPLLQL

SEQ ID NO: 29994 - protein, 82 aa, Glycine max
  Clone ID: TF_700746076H1.pep
PGGAASAETQPSQATERRSRSSTVSSSLSAEAETFSTNSTISSQRSACPPLRHALALFARSGSARHRHKTSARETQRESSSR

SEQ ID NO: 29995 - protein, 70 aa, Glycine max
  unsure (1)..(70): unsure at all Xaa locations
  Clone ID: TF_uC-gmroLIB3259P220d12a1.pep
ASPDRACSLAKQAFVEGIAGLDPLXEESSLGCAVVRQLLGDSLTLWTXHRQEDGAHAIRDAAPTGGWARH

SEQ ID NO: 29996 - protein, 141 aa, Glycine max
  unsure (1)..(141): unsure at all Xaa locations
  Clone ID: TF_GmC1228_4.pep
LEVFFYKMKGDYYRYLAEFKSGDERKEAADHSMKAYQSASTTAEAELPPTHPIRLGLALNFSVFYYEILNSPERACHLAKQAFDEAISELDTLSEESYKDXATLIMQLLRDNLTLWTSDIPEEGAEEQKVDSARAAGGDDA

SEQ ID NO: 29997 - protein, 98 aa, Glycine max
  unsure (1)..(98): unsure at all Xaa locations
  Clone ID: TF_9902456.pep
ASATTPREEFVYMANLAEQAERYDEMVEFMEKVSGNAENXELTVEEHNQLCVTYKNRIRTSRACWRIISXIEQNEESQGNEDHGPVIRSYRSQIKAEL

SEQ ID NO: 29998 - protein, 48 aa, Glycine max
  Clone ID: TF_LIB4200-007-Q1-N1-E11.pep
LAKQAFYEAIVELDPLGGESSKDSPLVMQFFCDTLTLGAFYKQDNGAN

SEQ ID NO: 29999 - protein, 52 aa, Glycine max
  Clone ID: TF_11274056.pep
FSVFYYEILNSPDRACNLAKQVRFRDSEYHGLCFALFICVLLYFEQSFGCLT

SEQ ID NO: 30000 - protein, 69 aa, Glycine max
  Clone ID: TF_GmC566258_1.pep
MSRRSNYDRYGPAFTHPLSRPSHAETYDEMVQCMKIVAQLDLGLTVDGRLLLSVGYVTVIGSRRASWRV

SEQ ID NO: 30001 - protein, 145 aa, Glycine max
  Clone ID: TF_uC-gmflLIB3275P131g01b1.pep
HIAAAEGLYFMAKLLLEGGASVFTKDRWGNTPLDEARMCGNKNLIKLLEDAKSAQLSEFPSQEYTDKMHPKKCTVFPYHPWDPKDNRRHGIVLWIPHSIQELIKSAAEQIEFSGDACILSEDAGKVTDVDMIKDGQKLYLVHETH

SEQ ID NO: 30002 - protein, 291 aa, Glycine max
  unsure (1)..(291): unsure at all Xaa locations
  Clone ID: TF_GmC27269_1.pep
MSTAEAPPSFQEAARCVVCNCSFNTFRRRHHCRSCGRTLCNEHSSNQMALPQFGLYSNVRVCADCFNNLRSGKDEPQTSSDGVNSVTDTISKLDINANVDSKSILTAETKLLSGIKECKCGMPLCICEAPTPSSDAFPQQKPNPVIAAPSNPKPKKTDTVPKIRSSISTSKFSSMFNVGHVTNGTSDRPQIDYEVTGEGLREAIKNSDVAAVKKLLNEGVDANYRDKQGLSLLHLAAVFNQTDIVFILMDSGAXWSTTMDQGETPIDCVYLSLQYKMRKKMEEGGTVDQSI

SEQ ID NO: 30003 - protein, 136 aa, Glycine max
  Clone ID: TF_GmC133757_1.pep
MTFPSMGIVANWVLLWLKLSIYSHWNPKVLFLELDRTHKRQIYIAASSGNWSEALSYFKIHPHWWRIPLTSRGVTALHVAVSMRKTSFVEKLVDRVDRMNMQDLEIRMADGNTAFCLAAITGNVKCAKILLGKNPG

SEQ ID NO: 30004 - protein, 150 aa, Glycine max
  Clone ID: TF_uC-gmropic020c12b1.pep
MRSETLEKVNSDMEAKGVRFLAYQSIFSSVGSGDFDGVKKLVEEAKKEEGSSLSDVMSLQNDAGETALYIAAENNLQEMFSFLLSICHFEVDKIRSKADMNAFHVAAKRGNLDIVRELLNIWPEVCKLCDFSNTSPLYSAATQDHLDVVD

SEQ ID NO: 30005 - protein, 323 aa, Glycine max
  Clone ID: TF_GmC4222_2.pep
MESKNPARFTLGKQSSLAPERHNKEAELQKDGEAVDQGVRLMYSAFEGDVDGIREALESGVSVNYKDIDNRTALHVAACEGFTDVVDLLRQKGTEYLPKGDLRDFLKRKGALKPSTAVRFALDIARGVGYLHENKPSPIIHRDLEPSNILRDDSGHLKVADFGVSKLLAVKEDKPLTCHDTSCRYVAPEVFRQEYDTKVDVFSFALILQEMIEGCPPFSAKQDDEVPKVYAAKERPPFQAPAKRYSHGIRELIEECWNENPAKRPTFRQIITKLESIYNTIGHKRHWKVRPLKCFQNLEALLKRDHSNGSSRGGSSRSTSSRI

SEQ ID NO: 30006 - protein, 70 aa, Glycine max
  unsure (1)..(70): unsure at all Xaa locations
  Clone ID: TF_LIB4164-057-R1-N1-B9.pep
LPYLQTYFGFLXLMFIINLQTYFQCLFPYGFILLALNMEERKNGNALDSAYVGNNAWEHRLCGEASSSRS

SEQ ID NO: 30007 - protein, 220 aa, Glycine max
  Clone ID: TF_GmC238964_1.pep
MAKSSKDPTTSYPAIKSEQYLHSPVHYAVAIRDHTKLSRIISSLPRVPDPARVITESDSLTQERVAEKISAVLDRRDVPFRETPLHLAVRLNDVSAARAIASAGADISLHNAAGWNPLQEALCRRASEIAQVLVRLHHRAAWAKWRRRLPRLVAALRRMRDFYMEISFHFESSVIPFVGKIAPSDTYKIWKSDGNLRADTTLAGFDGLKIHRADQSFLFL

SEQ ID NO: 30008 - protein, 178 aa, Glycine max
  Clone ID: TF_uC-gmflLIB3275P093b11b1.pep
MDHNHHHRHHNHNHALHTTPLSEPTTPTTPRPTLFLSTSGKALLLSNSNKRLDTPRKKYVKQVTGRHNDTELHLASQRGDVDSVRHVLAEIDSIMMGSLEFDAELADIRSAIFNEVNDLGETALFTVAEKGHLDVVRELLPYTTDDALSSKNRSGFDTLHIAASNGHLAIVQALLNHD

SEQ ID NO: 30009 - protein, 227 aa, Glycine max
  unsure (1)..(227): unsure at all Xaa locations
  Clone ID: TF_GmC60497_1.pep
RVSCEIEGRERERMEQIPLFNEKMKLAQKAAMAKRWEDFKKIMKDDQENLLKQFDLFENSAIHVATRSNSPRLLRELIEMLPKEERWQALCKENREGNTVLHEVVFCKKKKMADVVFEIEDELLLQQQSSSLEEKRTLLDMRNHRGETPLFMAAMHGKLKMLKHMANRTGTRNMEDFRKHLHRSDKYSALHASVMGQHXDVAIWLVRMNRELAMXKDEKELTCLQLL

SEQ ID NO: 30010 - protein, 167 aa, Glycine max
  unsure (1)..(167): unsure at all Xaa locations
  Clone ID: TF_GmC1132_2.pep
NVDSKDXNDTTAIQIAMAENHVDMVHLLVMNGADVSDVHNHEFCSSTLDEMLQKREIGHLINVTEVMRSGVVLKGKHQEQELNGGRSNGLKFPRVSIYRGHPVVRREKGSVEAGKLIRLPDSLEELKTIAGEKFGFDAKDAMVTNEEGAEIDSIDVIRDNDKLFFVE

SEQ ID NO: 30011 - protein, 195 aa, Glycine max
  Clone ID: TF_GmC252_1.pep
QASGTFMPALGTVFKRLGFPPIELDNPHVPLPRRHVDRRPPLGVHRIHFQLLAVVAVALQLKLHRVDSVHCRGLVKNRFVDFAAGGFQKLHRLEAPNPNCERHEGFRRRAANPRRRRRCRIPWRRGGRRGRRGGRVWRIVGGGVRRWPFGWGAWWLGRLWRREGRREGVDQRAERVVVCKKQKRVGELWRRVCGG

SEQ ID NO: 30012 - protein, 114 aa, Glycine max
  Clone ID: TF_GmC77836_1.pep
MSSDALKVAAEGNNIDGLYQEIQQDPRILESIDSIPFVETPLHVAATLGHFEFATEIMTLKPSFAQKLNPEGFTPIHLALQCNHDEMVLRLVEMNKDLVRVKGREGLTPLHLAS

SEQ ID NO: 30013 - protein, 81 aa, Glycine max
  Clone ID: TF_GmC673008_1.pep
MMTLVDELETLVDELDALDLGSSVVPVKKVPYGDVFEASRAGDVERLRYLLEAGVNVNARDQWDSVALYYACLAGHLDAAR

SEQ ID NO: 30014 - protein, 308 aa, Glycine max
  unsure (1)..(308): unsure at all Xaa locations
  Clone ID: TF_GmC84_2.pep
AAAAEAKEKEKARVSRTSLILWHAHQNDAAAVRKLLEEDPSLVKARDYDSRTPLHVKSLHGWVEVSKCLIEFDADVNAQDRWKNTPLADAERAKRTAMIELLKSHGGLSYLXQDFRHEVNLLVKLXRHPNVVQFLGAVTDKKPLMLITEYLRGGDLYKYLKDKGALSPSTAINFGLDIARGMAYLHNEPNVIIHXDLKPRNVLLVXGADHLKVGEFGLSKLIKVQSXMTGETGSYCHMAPEVLKYRRYDKKVDVFSFAMSEMLEGEPPFSIXEPYDGAKYVAEGQRPSFRAKGYILNCKTVVVVGGWG

SEQ ID NO: 30015 - protein, 149 aa, Glycine max
  Clone ID: TF_GmC39086_1.pep
MEANGIAHDSSSLGAGRRDKREVGDKMVEDLSKYAHSPAHLAVARRDHASLRRIVSALPRLAKAGEVHTEAESIAAELQADEVSTFIDRRDVPGRETPLHLAVRLRDPVSAEILMAAGADWSLQNEHGWSALQEAVCTREEAIAMIIAR

SEQ ID NO: 30016 - protein, 276 aa, Glycine max
  Clone ID: TF_GmC124507_1.pep
MEIRLEIRGVETAKEAWNRLGALYSSQLKADPDIEQGVVDDSLHEYKPLHRYVESGDWKNAKSMINKDVKAIFSTSSTGRTVLHVAVIAGYENIVRNLVKIGKEKLVKMQDNYDYTALALAAEYTGNVNMAKCMVDQKKGGKDLLLIKTKGGEIPVLLSAAKGYKDMTRYLYSQTQLEAFIDKNSHIGVLLLARCITAEIFDVALSLIHRIPKLPLTHESDGQRPLYALAHMPCAFPSGSGFGRLQQLLYDRRFCDMALNFPPVKLLGRLLIFLYL

SEQ ID NO: 30017 - protein, 112 aa, Glycine max
  unsure (1)..(112): unsure at all Xaa locations
  Clone ID: TF_22541747.pep
RDLALLTNAKGETPLHIAAXGHSNITNLLVEHVKAFPAANKFMRARNDEKDTALHEAVRNHHIEVVKTLLEMDPDYSYETPLYLPSERQYQQVVAQISNKVKAPAYVGPNNQ

SEQ ID NO: 30018 - protein, 121 aa, Glycine max
  unsure (1)..(121): unsure at all Xaa locations
  Clone ID: TF_GmC88220_1.pep
MMNNLTIETEDSFASLLELAANNDVEGFKRMIERDPSCVDEVGLWYSRQKGSRRMVNELRTPLMVAATYGSIDILDLILSLSGCDINNPVAFDKSTALHCAASGGSENXVDVXILLLPAGA

SEQ ID NO: 30019 - protein, 649 aa, Glycine max
  unsure (1)..(649): unsure at all Xaa locations
  Clone ID: TF_GmC1245_1.pep
AGIDATKYGHSPVHKALVLKDHGELRRILAGLPRLRNXAEFRTEAVSILEEEKADVIASEINQRDVPNHDTPLHLAVKFGDEVATELLKVAGANGSLQNEQSWSVHQEACCIIEEGMGNQLRNHYQPLRXAKFFGRVTGLVIITRKKLALYLESIWLFKKLGIFVITWISPLXSSKFXKRDSTRSADMTLAGXFDGIKSQISVHAILFLGDGSEDGKVPPGSLCMISHKEKEVLNALDDAGFPANDEEVQQEVVAMSKTNIFRPGIDVTQAVLLPQLTWRRQEKTEMVGPWKAKVYDMHNVVVSIKSRGVPGAMTDDELFSSCNENETESEELNDILTEDERRQLEDALRLESTDLNNESDEVIIGHRHSCYEEREIPIEDGNCNKSGENKQEKKGWFGGWRKKDSKPEASKKIAPPRSSLCVEEKVSDLLGDSPSRNQSKPGRHSVEIAVKGDESRRRKDAKASSANSDSRSRHKDGNRENEYKKGLRPILWLSPNFPLKTEELLPLLDIVANKVKAIRRLRELLTTKLPMGTFPVKVAIPVVPTIRVLVTFTKFEELEPVDEFATPPSSPSAAEQESPAVPHFSASSWFQWIKAPYRSSTSAPGSSSRIENIEDPFAIPSDYTWVTAEAKKKKMQEKNKSKKGKSHN

SEQ ID NO: 30020 - protein, 669 aa, Glycine max
  unsure (1)..(669): unsure at all Xaa locations
  Clone ID: TF_GmC335_1.pep
SHEMNHLSLDTEDSLASLLLELAANNDVSGFKRLIECEPSSIDEVGLWYGRHKESKKMVNEQRTPLMVAATYGSIDVMTLILSLSEADVNRSSSQDKSTXLHCAASGGSDIVVDAAXLRLTRCRYRNTCNHNVQCSRSSSWILQWRINXGAENGSASLNLLLEAPGGDKCHXSSCAAAELKLVSAEPDEMKKKPVSVNINKKSMMKFSDGRWLQXPKNVRSTKINNPHGRFIFRFSVTKVXSRVRKPEGGVNRINAIVNFXKRAFTRGDMCEYAHGVFECWLHPAQYRTRLCKDGTNCARRVCFFAHTNEELRPLYVSTGSAVPSPRSSASSAMDFVAAISPSSMSVMSPSPFTPPMSPSSASIAWPQPNIPALHLPGSNFHSSRLRSSLNARDFSVDDFDLLLPDYDHHHHQQQQQQFLNELSCLSPHAMNCNTMNRSGRMKPLTPSNLDDLFSAESSSPRYADPALASAVFSPTHKSAVFNQFQHQQSMLAPLNTNFASKNFEHPLLQASLGMSPRNVEPISPMGSRISMLAQREKQQFRSLSFRELGSNSAAASADSWSKWGSPNVKLDWPVGAGEVGKLRRSSSFELGNNGEEPDLSWVQSLVKESPAEVKDKLATTVSYVAAAAAGSSSEGSNISTQMESVVDHAVLGAWLEQMQLDHLVAQQN

SEQ ID NO: 30021 - protein, 110 aa, Glycine max
  Clone ID: TF_LIB3242-347-Q1-J1-H4.pep
NQVLPTVFTFPQFPTISSPNNLILASKPFAGNSRYKHSKTPLHLTTFSGQSKVITYLSKHKADVGASAMDYMAAIHFSSHKGHFEVVLALLSTCAFLKTVTLKSMTSLHY

SEQ ID NO: 30022 - protein, 52 aa, Glycine max
  Clone ID: TF_LIB4164-051-R1-K1-G4.pep
FVYQILEKCRNLVLLPNAKGETLLHIAARYGHSNIAKLLVQRVKAFPPAGRL

SEQ ID NO: 30023 - protein, 126 aa, Glycine max
  unsure (1)..(126): unsure at all Xaa locations
  Clone ID: TF_LIB3242-687-P3-J1-C12.pep
TRLEVGATCLHYAAYYGHTNCLTAILSAAHSTPRCRDLGRGXFADIRHGNRATPMHLAARHRWADCLHALIDNGALGRASTGGYGYPASTPLHMADRGATIDLSPGRVGIKSITTTLSLLCIRNIP

SEQ ID NO: 30024 - protein, 169 aa, Glycine max
  unsure (1)..(169): unsure at all Xaa locations
  Clone ID: TF_GmC167955_1.pep
MAVADSISFQEQLLQRVASAQFRKPLLHLVSTQEDKGRYLTQCVPLHKASLKGDWKEARKLLDQDGSLLKTAITKGGWATLLHIAVGANRVHFVEELLKLMQPEELELQDHKGNTAFCFAAAVGNVQIAEMMERINASLPTIRGXRRTXTPLHLAVLQGKKRNGMASVP

SEQ ID NO: 30025 - protein, 103 aa, Glycine max
  unsure (1)..(103): unsure at all Xaa locations
  Clone ID: TF_LIB4167-039-R1-K1-A1.pep
MSFEDVNAAVSEFARRFNPILKGDWESTKAFLDNDPSALTAKVTAIGGTALHAAAVGGQWQIIEKLVQHVPAQVLSDLDLMGCTCLHYVAMGESTSAAKALXG

SEQ ID NO: 30026 - protein, 111 aa, Glycine max
  unsure (1)..(111): unsure at all Xaa locations
  Clone ID: TF_LIB3028-044-Q1-B1-F5.pep
NGTAGGGSIIANDKKAVYRHIVKSEVNLNAIINGKAGFSSNTPSSINPDISCESKTPQVEDIHDGSSVLHLACIISDSAMVELHRQXGADVNAIDSRGRTPLHYSTMRGKN

SEQ ID NO: 30027 - protein, 568 aa, Glycine max
  Clone ID: TF_GmC64_1.pep
MEVFFSQCVPLYKHALDGNWQAAKHILDANPALKTAAIAPGWPTVLHVAAGTNHYHFVEELLNILDNDAIQLQDKKGNTAFCFVAAAGNWRIAELMQKRNILLPTVKGGDGMTPLHFAALQGRCPMACKLYPMTKEMFDDEDWELLFFTCIKTCNYHLALKMVRDRKELAFARDGNNGEEKKGGIALHLLAQNQKPLDSCCHCHQHQIPVKINPGMKQHVFLQLVNFLWNTLLENIDSKSKILDIISEPSHLLFDAAEVGNFGFLSELISAYPSLIWEVDSRNRSIIHTAVLNRHASIYNLIHEIGSIKDIIVTFAGEEDENTLLHLAAKLAPPSQLELVSGAAFQMSLEISWFEEVNKIMPPSFRWMKNSEGLTARELFTKEHADLRKNAESWMKRTAESCMLISTVIATGVFSAAISTPGGMNDESKEPNYLDKTSFLIFAVSDATSLISSATAILIFLSILISRYAEYDFHKSLPLKLIFGLISLFISITSMMVAFGCSFFITYYYGMKWVPSFISVLACLPILLFIGLQFSLWSVIIYSTYYCKALFKPGKKMLYVVERKGYNV

SEQ ID NO: 30028 - protein, 310 aa, Glycine max
  Clone ID: TF_GmC78648_1.pep
MLRHLRLEDFLSLKPVDPSNHSFEGDMEKRNLIFKLISLREEEEYSIKDEVTTELDISQHMVKEHLFHKQFKEKLYSWLLHKVTESGKGPNVLDEDGQGVLHLAAFLGYDWAINPIISAGVNINFRDVNGWTALHWAASCGRERTVAVLVSMGADCGALTDPSPSSPAGRTAADLASSYGHKGISGFLAESSLTHHLETLTMDDQKGGRQEISGMKAVQTVSERSATPVHFGDMPDLCLKDSLTAVRNATQAADRIHQVYRMQSFQRKQLTQYESDELGLSDQQALSLLASRACKSGQGDGLANAAAVQI

SEQ ID NO: 30029 - protein, 399 aa, Glycine max
  Clone ID: TF_GmC797_1.pep
RQDRYRCAAACSAVDVSSMFIVRKNGKSSLHNAARYGVHRIVKTLIALDPGIVCIKDKKGQTALNKAVKGQCTSVVEEILLADPSILNERDKKGNTALHMATRKCRSQIVGLLLSYSAVDVNAINKQQETALDLADKLPYGDSALEIKEALAEYGAKHARYVGKEDDAMELKRTVSDIKHEVQSQLIQNETTRRRVSGIAKELKKLHREAVQNTINSVTLVAVLFASIAFLAIFNLPGQYITDEGKEIGKAKIADHVSFQVFCLLNSTSLFISLAVVVVQITLVAWDTRAQKQIVSVVNKLMWAACACTCGAFLAIAFEVVGKKTWMAITITLLGVPVLVGTLASMCYFVFRQHFGIFRSDSQRRIKRASGSKSFSWSYSANISDLDEYNSDIEKIYAL

SEQ ID NO: 30030 - protein, 352 aa, Glycine max
  Clone ID: TF_GmC42_23.pep
MASDSKKDFPADDKAGTEESKTSKDETSSKDSPAEQRATATFGPRPGPAGLPGNPFDLSAMSGLLNDPSIKELAEQIAKDPSFNQMAEQLQKTFQGAPQDAIPSFDNQQYFSTMQQVMQNPNFMTMAERLGNALMQDPSMSAMLESFSNPSNKDQLEERMARIKEDPSLKHILEEIETGGPAAMMRYWNNEEVLQKLGQAMGLANSGDAGASAENSGADETEDLGNEDESIVHHTASVGDVEGLKNALASGADKDEEDSEGRTALHFACGYGEVKCAQVLLEAGAKVDALDKNKNTALHYAAGYGRKECVALLLENGAAVTLQNMDGKTPIDVAKLNNQNEVLKLLEKDAFL

SEQ ID NO: 30031 - protein, 251 aa, Glycine max
  Clone ID: TF_GmC265_1.pep
MGNPRKPSTADELHTAARSGDLIAVNSILASNPLAVNSRDKHSRTPLHLAAFSGQAEVVTYLCKQKADVGASAMDDMAAIHFASQKGHLEVVRALLSAGASLKATTRKGMTSLHYAVQGSHMELVKYLAKKGANLGAKTKAGKTPLDLATNEEIRSFLEEYEKSAKNGELGKKDKDKAEESDPKTSTLGSEGDLSSEPAAAAIDEEDNVGEKRKKGNEDGTREEESSQPKKARVNLSHLQSSDDTQEEENL

SEQ ID NO: 30032 - protein, 327 aa, Glycine max
  Clone ID: TF_GmC5728_1.pep
EPFYISRQREPSITSLQWRKIAREVEFNSKVEKKRRGLIPLRDMNLDDYKAYKEAKLAQMKLLDYSSSFPVDENVPEPQLNRGEKFEAEAELDGGERVAPKNPRWAVYGRGLEDVTEFFNSDNYDPTAKTPGGRRKLFNKEEKVLLNKRIPDLAAATSDKWLPLHTLAACGEFHLLDSLLKHNVDINAVDKDGLTALHRATIGKKQVIINYLLRNSANPFVQDNEGATLMHYAVLTASTQTIKILLLYNVDINLQDNYGWTPLHLAVQAQRTDLVRLLLIKGADKTLKNEDGLTPLDLCLYNGQSARTYELIKLFKQPQRRLSHVSV

SEQ ID NO: 30033 - protein, 140 aa, Glycine max
  Clone ID: TF_LIB3093-017-Q1-K1-A6.pep
PTRPVSVCFAAARGDDLLLHQLLKRGMDPNESDNNRRTALHIAASQGKENCVSLLLDYGADPNIRDLEGNVPLWEAIVEGHESMSKLLSENGANLQCGDVGQFACNAVEQNSLNLLKEIMRYGGDITLPNSNTWTTALHV

SEQ ID NO: 30034 - protein, 342 aa, Glycine max
  Clone ID: TF_GmC312_1.pep
RLPKYTGFRTDKKGQTALHMAVKGQNEEILLELVKPDPAVLSLEDNKGNTALHIATKKGRTQNVRCLLSMECININATNKAGETPLDVAEKFGSPELVSILRDAGAANSTDQRKPPNPSKQLKQTVSDIKHDVQSQLQQTRQTGMRVQKIAKKLKKLHISGLNNAINSATVVAVLIATVAFAAIFTVPGQYVEDKTHGFSLGQANIANNAAFLIFFVFDSLALFISLAVVVVQTSVVVIEQKAKKQLVFVINKLMWMACLFISIAFISLTYVVVGSHSRWLAIYATVIGSLIMLSTIGSMCYCVILHRMEETKLRAESRSFSMSHASDQEILNSEYKRMYAL

SEQ ID NO: 30035 - protein, 349 aa, Glycine max
  Clone ID: TF_GmC1132_1.pep
TLTQLLRLKTNTLLEAMQIKREDNIQILKNFLQHFKQVKDLSIKDLMVENVEEEDPNMAVNLLTVASTGNAAFLEELLRAGLDPDIGDSKGKTPLHIAASNGHEGCVKVLLKHACNMHIKDMNGNTALWDAIASKHYSIFRILFQLSALSDPNTAGDLMCTAAKRNELTVMTDLLRQGLNVDSKDHRDTTAIQIAMAENHVDMVQLLVMNGADVSDVHNHEFCSSTLNEMLQKREIGHLINVTEVMLSEVVLKGRHQEQEHNGGRSNSGLKFPRVSIYRGHPVVRREKCSMEAGKLIRLPDSIEELKTIAGEKFGFDAKDAMVTNEEGAEIDSVDVIRDNDKLFFCWIS

SEQ ID NO: 30036 - protein, 507 aa, Glycine max
  Clone ID: TF_GmC67_1.pep
RDLFQLVSEMKAEYFPPKEDVILQNEAPTDFYILVTGAVELLVLKNGVEQVVGEANASVRLVIFTEGGEIGVLCYKPQLFTVRTKRLSQLLRLNRTTFLNIVQANVGDGTIIMNNLLQHLKEINDPIMEGVLVDIENMLARGRMDLPVSVCFAAARGDDLLLHQLLKRGMDPNESDNNRRTALHIAASQGKQNCVLLLLDYGADPNIRDLEGNVPLWEAIVGGHESMSKLLSENGANLQCGDVGQFACTAAEQNSLNLLKEIMRYGGDITLPNSSNTGTTALHVAVSEGNVETVKFLLDHGASIDMPDKHGWTPRDLADQQAHTEIKALFDSIGEPKVHSSVAIPVRNSKIKYLGRFTSEPTMTLPLDGSFHGTDGSWSQNQSQNQSRPRRRSNNYHNSLFGILSAAHNGEKYLLSAVDMNNNARNGMKSSSAVGPTRVIISCPEKGEVVGKLVLLPGSFQELVEIGAKKFGFYPNKVVCKDGGEIEDIEIIRDGDHLVFLGASGGC

SEQ ID NO: 30037 - protein, 911 aa, Glycine max
  Clone ID: TF_GmC60185_1.pep
MMMSHNLTGQLVGAEIHGFHTLDDLDVSNTMEEAKSRWLRPNEIHAILCNHKYFKINAKPVNLPKSGTIVLFDRKMLRNFRKDGHNWKKKTDGKTVKEAHEHLKVGNEERIPEYYAHGQDNPTFVRRCYWLLDKNLEHIVLVHYRDTQELQLQGSPATPVNSNSSSASDPAASWIPSEDLDSGVNSAYAVELNDNLTAKSHEQRLHEINTLEWDDLVVPNVNTSTTSNGGNVPYSFQENQSLLSGRFGNVSSNPSAEIPSFGNLTQPVSGSNSAPYSFPDSAILLKNSPISSGGVDTLGTLVNEGLQSQDSFGTWMNIISDTPCSIDESALKASISSVHVPYSSLVADNLQSSLPEQVFNLTEVSPTWASSTEKTKVLVTGYFHNNYENLAKSNLLCVCGDVSVPVEIVQVGVYRCCVPPHSPGLVNLYLSFDGHKPISQVVNFEYRTPILHEPTASMEEKYNWNEFRLQMRLAHLLFASDTSLNIFSSKVSTNALKEARRFSFKTSYISKSWQYLMKSIDDNTIPFSKVKDSLFETALKNKLKEWLLERIILGRKSTEYDAQGQGVIHLCAMLGYSWAISLFSWSGLSLDFRDKFGWTALHWAASYGIEKMVATLLSCGARPNLVTDPTPQYPGGCTAADLAYVKGCDGLAAYLSEKSLVEQFNDMSLAGNISGSLETSSTDPVNAANLTEDQLYLKETLEAYRTAAEAAARIQAAFREHSFKLRYQAVEIMSPEEEARQIVAAMRIQHAFRNYESKKKMAAAARIQLRFRTWKYRREFLNMRRQAIKIQAAFRGFQARKQYRKIVWSVGVLEKVILRWLLKRKGFRGLQVNPAEEETQESDTIAEEDFFRTSRKQAEERVERSVIRVQAMFRSKKAQEEYRRMKLTHNQAMLDELEEFLNSEDDMLPKT

SEQ ID NO: 30038 - protein, 532 aa, Glycine max
  Clone ID: TF_GmC506_1.pep
PDCDYSDADLVVEGIPVSVHRCILASRSKFFHELFKREKESSEKEGKLKYNMNDLLPYGKVGYEAFLIFLGYVYTGKLKPSPMEVSTCVDNVCAHDACRPAINFAVELMYASSIFQIPELVSLFQRRLLNFIGKALVEDVIPILTVAFHCQSNQLVNQCIDRVARSDLDQISIDQELPHELSQKVKLLRRKPQQDVENDASVVDALSLKRITRIHKALDSDDVELVKLLLNESDITLDEANALHYAAAYCDPKVVSEVLGLGLANVNLRNSRGYTVLHIAAMRKEPSIIVSLLTKGACASDLTFDGQSAVSICRRLTRPKDYHAKTEQGKETNKDRICIDVLEREMRRNPMAGDACMSSHTMADDLHMKLLYLENRVAFARLFFPSEAKLAMDIAHAETTSEFAGLSASNSKGSNGNLREVDLNETPIVQNKRLLSRMEALTKTVEMGRRYFPHCSEVLDKFMEDDLPDLFYLEKGTHEEQRIKRTRFMELKDDVHKAFNKDKAEFSRSGISSSSSSSSLRDSVVHYKARKV

SEQ ID NO: 30039 - protein, 296 aa, Glycine max
  unsure (1)..(296): unsure at all Xaa locations
  Clone ID: TF_GmC231432_1.pep
METKKLHPRFSLGRQSSLAPERAGAGDSSEALDPAVRLMYLANEGDSDGIKELLDAGSNVNFTDIDGRTSLHVAACQGRTDVVDLLLRRGAHVDPQDRWGSTPLVDAMYYKNHQVVKLLEKHGARPPMAPMHVQNAREVPEYEIDPSELDFTNSVCITKGTFRIALWRGIQVAVKTLGEELFTDDDKVKAFHYELTLLEKIRHPNVVQFLGAVTQSTPMMIVTEYLPQGDLGAYLKRKGALKPVTAVKFALDIARGMNYLHEHKPEAIIHRDLEPSXILRDDSGHLKVADFGVSKL

SEQ ID NO: 30040 - protein, 460 aa, Glycine max
  unsure (1)..(460): unsure at all Xaa locations
  Clone ID: TF_GmC798_1.pep
MAPDASDALAVRQKVQLFLNAARTGSIDLLKKLALQLDEGKDLAKSVEAIKDANKRGALHFAAREGQTSVCEYLLTDLKLSVDSQDDDGETALIHAARQGHTATAKYLIDHGADPTVASNLGATALHHSAGIGDAELLKYLLSRGVNPDLESDAGTPLVWAAGHAQPAAVSVLLEHGANPHAETDDGITPLLSAVAAGSLACLELLIQAGAKANISGQAEHALADAKIMEVLNYDXCQKLVIGNGQLSDEDGVKLKQQVAARGYPKAVEILFPLTSKVDTIPTWTVDGILEYMQSETRKQQDESINAKETNQPKEADFPEQNVPEVAPEAKKRAAEAKSRGDGAFKRNDHHMAIDFYTQAIDLNPIDATLLSNRSLCWIKLGQAEHALADAKACRALRPDWPKACYREGAALRLLQKFDEAANAFYEGVKLDPENKELVNAFREAVEAGRKFHGTAENKS

SEQ ID NO: 30041 - protein, 74 aa, Glycine max
  Clone ID: TF_17022045.pep
SMVTIRSVIWFLNSCCIVCIMKPYSCIIEGLTCIYTSTTCTAFIIIYIILFLLIKKKTMTYSDHKVPRSNEEYR

SEQ ID NO: 30042 - protein, 105 aa, Glycine max
  Clone ID: TF_LIB3087-005-Q1-K1-G2.pep
MGQSLSCSGNYDHGLFTGGQHGDLEIVTTVLDSDPSVLHQTTLYDRHSPVHIGATNDQIEILSKLLDGSLNPDVLNRHKQTPLMLAAMHGNIACVEKLLQAGANV

SEQ ID NO: 30043 - protein, 315 aa, Glycine max
  Clone ID: TF_GmC6832_1.pep
LDQTALERNKKGHLPVHLACKRGCVEMVKEFFEPGSGWPINPYVLLNQKGQNILHIAAKNGRDNVVEYLLGNCNTGHLHINQKDYDGNTPLHLASKNLFQQVISLITEDKRTDLNLTNEDGLTAGDISKTFEHPMLRGREILSMELSKGAGVPVNHMLHSQRQPQPEKDTSDFQRKSLSEKDTREAFLIVAALLMTVSFAAGFTVPGGLYSSDDPNPKIRGTAVFAGNSGFWIFIIFNTITMYSSAMACGLLSVGIVNRSKLSRFSDLFLTCAFLAASVAFLAAVLLVVANNRLLAGATILIGALHYILYFFVIK

SEQ ID NO: 30044 - protein, 382 aa, Glycine max
  Clone ID: TF_GmC269_1.pep
MEAIFVTKPASHSLLLTKLSPNPKHLFPPHQQSFHNIRHKPTRFRPVIAVFQNQHQQDAAAASNHTEDESYGEVKGIIGSRALEAATGMEYLIEWNDGHAPSWVPADFIAKDVVAEYETPWWTAAKKADESALKNLIESDDGRDVDAVDADGRTALLFVAGLGSESCVKLLAEAGANLDHRDRSGGLAALHMAAGYVRPGVAKVLLDLGADPEVADDRGRTALDLAREILKVTPKGNPMQFGRRIGLEGVIRVLEGAVFEYAEVQEILERRGKGENLEYLVRWKDGGANEWVKAKFVAEDLVKDYEAGLEYAVAEAVLAKRVADEGTPEFLVKWADLEEPTWEPEENVDPELVKAFEGSNNQAQPSSNGPAVVFSNQDSPSL

SEQ ID NO: 30045 - protein, 179 aa, Glycine max
  Clone ID: TF_GmC1249_2.pep
ERKKERKMLEEQPVVLFRKSPSRRRLRSAFATDDRGWTSLHVFARKGDLKLVKKLLNEGMDVNVSAWGPKSKGVTPLHLAAEGGHIGVMDVLLECGADIDARTKGACGWTPLHIAAKERRRDAVKFLIENGAFMPPDISDSRFNPPLHYCPGLEWAYEEMKRLRQEDLSAGETCYSSES

SEQ ID NO: 30046 - protein, 97 aa, Glycine max
  Clone ID: TF_GmC265_4.pep
MGNPRKPSTADELHMAARSGDLIAVNSILASNPLAVNSRDKHSRTPLHLAAFSGQAEVVTYLSKHKADVGASAMDDMAAIHFASQKGHLEGVRALLS

SEQ ID NO: 30047 - protein, 791 aa, Glycine max
  Clone ID: TF_GmC74695_1.pep
MGINSNFSQGEEIMVPYLTTSIAKQHENGSIIKAEGNWQVYDVDSLRMSSWPIDSAYSGSTCEVSCSNCEQEVNDVDFQKSLEQCLLHSHKQNKVLMQNDLQEKLLNEKEKIKSNLEAYGIEDTYLSFKRTLLDGPPAEEGLKKLDSFNQWMSKELGDVEESNKPSTSGGYWDTVETENEVGNTTIPSQGHLDTYVLDPSVSHDQLFSIIDYSPSWAFEGSEIKVIISGEFLRSQHEAEQCKWSCMFGEVEVPAVIIAKGVLCCHTPPHKAGRVPFYVTCSNRLACSEVREFDFQVHYTPEDTTGENRGSTFDTFSIRFGELLSLGHAFPQNSDSISVSEKSQLRSKINSLLREEEDDWDKLLKLTQEEDFSPENLQEQLLQNLLKDKLHAWLLQKITEEGKGPNILDEGGQGVLHFASALGYDWALEPTIVAGVNVNFRDVNGWTSLHWAAFCGRERTVAFLISLGAAPGALTDPCPEHPSGRTPADLASANGHKGIAGYLAESSLSAHLTTLDLNRDAGENSGAKVVQRLQNIAQVNDLDGLSYELSLKDSLAAVCNATHAAARIHQVFRMQSFQRKQLKEYDDDKLGLSDERALSLIKMNVKSHKSGPRDEPVHAAAVRIQNKFRSWKGRREFLMIRQRIVKIQAHVRGHQVRKSCGKIIWSVGILEKVILRWRRKGSGLRGFKPEANSEGTMIQDVSSTDDDYDVLKEGRKQTEQRLQKALARVKSMVQYPEARDQYHRLLNVVTEIQENQVKHESSYNNSEEPREFGDLNDLEALLDEDIFMPTAT

SEQ ID NO: 30048 - protein, 139 aa, Glycine max
  unsure (1)..(139): unsure at all Xaa locations
  Clone ID: TF_jC-gmXLIB3564P099ba06b1.pep
SHEMNHLSLDTEDSLASLLLELAANNDVSGFKRLIECEPSSIDEVGLWYGRHXESKKMVNEQRTPLMVAATYGSIDVMTLILSLSEADVNRSSGLDXSTALHCAASGGSENAVDAVKLLLEAGADXNSVDANGRRPGDV

SEQ ID NO: 30049 - protein, 156 aa, Glycine max
  Clone ID: TF_GmC1587_1.pep
QESSVQAHCPYGEKTTEGNLNAIISGKAGFSSNTPSSINPNISCESKTPQVEDIQDGSSVLHLACIISDSAMVELLLQYGADINAIDSRGRTPLHYSTMRGKNATARVLITRGANPLAVDKEGNTPFKPATEPDTAGKETLALNQQIACPQNLIEK

SEQ ID NO: 30050 - protein, 1020 aa, Glycine max
  Clone ID: TF_GmC516_8.pep
MSPAYLILLLSEGYEYDINDLHQEAQARWLKPAEVMYILQNHEKFQFTQEVPQQPTSGSLFLFNKRILRYFRRDGHNWHKKSGGRTVGEAHERLKVLNVEALNCYYARGEQNPAFQRRSYWMLDPAYEHIVLVHYRNTSEGKLSSGAGAQLSPSSSVYTQSPSPYSTQNPGSTSILGDSYEPNQSFSSPGSTKVTSEIFVLNNKMGHMDWADTESGTSSELEVTQALRRLEVQLSLNEDNFEDIVSFGSKHETVHDSNPKHDQRVISNQEQSAAFSRPDDQGLFYDGCNGRQVFLSSSLWKHQMGREEDHGYPDANEKALWTEQLESHKSSSAVKLPQKNVYMPAENENSVSSARRVPVSNQENSHWLNFNCNNSENCMIYFHLVNLTTFLVYFGVSSTSDSPPMLAAVFSQPQGVDEVKFPAYSSMLETQVINSDYYETLFDQSQIGAPPDANSSLTVAQKQKFTIKTISPEWGYATETTKVIVVGSFLCHPSDSAWACMFGDVEVPIEIIQDGVISCEAPSHLPGKVTLCITSGNWESCSEVREFEYHDKTNSCTRCTQSETEATRSPEELLLLVRLGQMLLSASTIKNDNIESGIPLIKPKADDDSWSHIIDALLVGSGTSSGTVDWLLEELLKDKFQQWLSFRSREKDEETGCSLSKKEQGIIHMVAGLGFEWALNPILTCGVNINFRDINGWTALHWAARFGREKMVASLIASGASAGAVTDPNAQDPTGKTAASIAASSGHKGLAGYLSEIAVTSHLSSLTLEESESSKSSAYLQADRTVNSVSKENLTANEDQASLKDTLAAIRNVTQAAARIQSAFRSHSFRKRRAREATASTGGIGTISEISAMSKLAFRNSHEYNSAALSIQKKYRGWKGRRDFLALRQKVVKIQAHVRGYQVRKHYKVIWAVGILDKVVLRWRRKGAGLRGFRQEMDINENEDEDILKVFRKQKLDVEIEEAVSRVLSMVDSPDAREQYHRMLEKYRQAKAELAGTSDEASLSTSVGDDLFMDDFYPFP

SEQ ID NO: 30051 - protein, 480 aa, Glycine max
  Clone ID: TF_GmC1240_1.pep
MNSRSQDQRSRPAKPATIHGCALSGDLVGLQRLLRDNPSLLNERNPVMAQTPLHVSAGHNRTEIVKFLLDWQGTDKVEMEAKNMYGETPLHMAAKNGCNEAAQLLLACGATVEARANNGMTPLHLAVWYSLRAEEFLTVKTLLEYNADCSAKDDEGMTPLNHLSQGPGTEKLRELLLWHLEEQRKQRAIEACSETKAKMDELEKELSNIVGLNDLKVQLRKWAKGMLLDEKRRSLGLHVGRRRPPHMAFLGNPGTGKTMVARILGKLLHMVGILPTDKVTEVQRTDLVGEFVGHTGPKTRRKIKEAEGGILFVDEAYRLIPMQKSDDKDYGLEALEEIMSVMDSGKIVVIFAGYSKPMKRVIASNEGFCRRVTKFFQFNDFNSEELAQILHIKMNNLAEDSLLYGFMLHPDCCIKALAALIERETTEKQRKETNGGLVDTMLVNARENLDLRLSFDCMDTEELLTITLVDLEAGLQQLTQ

SEQ ID NO: 30052 - protein, 188 aa, Glycine max
  Clone ID: TF_uC-gmflLIB3275P054d03a1.pep
SWVNTFNAFFNGQYYYYFQDKWLPLHTLAACGEFYLLDSLLKHNVDINAVDRDGLTALHRAIIGKKQAITNYLLRNSANPFVQDNEGATLMHYAVLTASTQTVKILLLYNVDINLPDNYGWTPLHLAVQAQRTDLVRLLLIKGADKTLKNEDGLTPLDLCLYNGQCARTYELIKLFKQPQRRLRHVSV

SEQ ID NO: 30053 - protein, 444 aa, Glycine max
  Clone ID: TF_GmC16_1.pep
MGQSLSCSGNYDHGLFTAVQHGDLEIVTTLLDSDPSLLHQTTLYDRHSPLHIAATNDQIEILSKLLDGSLNPDVLNRHKQTPLMLAAMHGNIACVEKLLQAGANVLMFDTSYGRTCLHYAAYYGHSSCLKAILSSAQSSPVSASWGFSRFVNIRDGKGATPLHLAARQRRSECVHILLDSGALVCASTGGYGCPGSTPLHLAARGGSIDCIRELLAWGADRLQRDASGRIPYMVALKHKHGACASLLNPTSAEPLVWPSPLKFISELNPEAKALLEQALMDANREREKNILKGSSYSLPSPSHSDGVADNMSEVSESELCCICFEQVCTIEVQNCGHQMCAQCTLALCCHNKPNPATACLTPPVCPFCRSTITRLVVVKTECHDETDQDSADINCSKLSKSSRKLRHLNDSGSSSFKGLSSVSSFGKLGSRSSGRIAAEWLDKQ

SEQ ID NO: 30054 - protein, 264 aa, Glycine max
  Clone ID: TF_GmC88213_1.pep
MDSNSKAVCFITHQAIFNAVRCGDLEGLKEQLKNKGEEGVSEVMSMQNDAGETMFYIAAEIGLREVFSFLFGLCDMEVLKIRAKSDLNPFHVAAKGGCLDIVREILSTWPEVCTLCDSSNTSPLYFAAIGDHLDVVNAILDVDVSSMMIVRKNGKTALHNAARYGILRIVKALIARDPGIVCIKDRKGQTALHMAVKGQSTSVVDEILQADLTILNERDKKGNTALHMATRKCRPQVVSILLTYTALNVNAINNQKETALDFAR

SEQ ID NO: 30055 - protein, 582 aa, Glycine max
  Clone ID: TF_GmC1882_1.pep
MDHHRHPHHTTPLSEPTTPTTPRPTLFLSTSGKALLLSNSNKSLLLSNSSKRLDTPRKKYVKQVTGRHNDTELHLAAQRGDAASVRQILAEIDSIMMGSFEFDAEVASVRSAIFNEVNELGETALFTAAEKGHLDVVKELLPHTSHDALSSKNRSGFDTLHIAASKGHLAIVQALLDHDPGLIKTFAQSNATPLISAATRGHADVVEELLSRDPTQLEMTRSNGKNALHLAARQGHVSVVKILLRKDQQLARRTDKKGQTALHMAVKGVSCEVVKLILAADAAIVMLPDKFGNTALHVATRKKRTEIVHELLLLPDTNVNTLTRDHKTALDLAEGLPISEEILEIKECLIRYGAVKANDLNQPRDELRKTMTQIKKDVYFQLEQARKTNKNVSGIANELRKLHRAGINNAANSVTVVAVLFAAVAFAAMFTVPGGDNDQGVAVMAHTASFKAFFISNAIALFTSLSVVVVQITIVRGEIKAERRVVEVINKMMWLASVCTSVSFISASYIVVGRRSQWAAILVTIVGAIVMGGVLGTMTYYVVKSKRSRRMRRKKGKFSKTGTQSWRLSSSDDSEINPIYAI

SEQ ID NO: 30056 - protein, 386 aa, Glycine max
  Clone ID: TF_GmC2979_136.pep
PGRHGGTPLHHAAKRDFDSIVNLLLLHGANPLVLNDDCLTALEVARAKGHSNVVRTIESHLCLFSGWLREFHGPGFLEVVAPQLVSKKVWVVVLPVGSRTLAKPYKLELAIYSRLQDAQPHTVIGLWNADLQEPKLHQSDPSVTVVNHTTKTRIKLGPASENDKQQLTWFSNACKGIPQASPAFLQNNVPTGPPTAPPDAEDTELAMAISASLQSAMQERPPFPDTQPSFDASSSSSAVNTDNHGFLGTPNPNTSDSELVQEANPDGNTQHLQSCVNPSALDLNPSAPPITNEIPGDGPIQYPSIDLSPVDMASPDAEKLLKEGQKSAGGSSSSCVICLDAPAEGACIPCGHVAGCMSCLNEVKSKKWGCPVCRAKIDQVIKLYHV

SEQ ID NO: 30057 - protein, 321 aa, Glycine max
  unsure (1)..(321): unsure at all Xaa locations
  Clone ID: TF_GmC311_2.pep
MAEWQSLLQSILVGLIFSYLLAKLISIVVSFKDDNLTVTRASAAETTATRAEQFEDALKRDDAVSSDARPFEEESVVAEHGSVRIDSDGDYDDDWEGVESTELDEAFSAATAFVAAAAADRLSQKVSSDVQLQLYGLYKIATEGPCSTPQPSPLKMTARAKWQAWQKLGAMPPEDAMQKYIDIVTEIYPTWLDGSSLRNKSGDSGGHGSEAKGPMGPVFSTFVYEEEYGSDSQMEAIHGFAREGDMANLLKCIENGVSMNXRDNDGQTPLHYAVTCEREAIAEYLVKHNADIYSKDNDGSSPRDICESNWPCMQHVGEEVN

SEQ ID NO: 30058 - protein, 179 aa, Glycine max
  unsure (1)..(179): unsure at all Xaa locations
  Clone ID: TF_GmC190413_1.pep
MCGGPEKSKSLSTPSSSAVEGSTNGKDMNKLTVHAADSFSCLLELASNNDFEDFKLALVRDVSLISEVGLWYVRQIGSKQIVLEHRTPLMVAAMYGSIDVLKLILSCPETDVNFSCGTDKSTALHCAASGGSVNAVDIVKLLLSAGADIXCVDANGNRPVDVIGVPPKLEGLKAPLKIY

SEQ ID NO: 30059 - protein, 675 aa, Glycine max
  Clone ID: TF_GmC26_1.pep
MCSDSKSKLSSPTLVVMENSNIQKQNLDGLYNSVLLELSASDDYEAFKREVEEKGLDVNEAGFWYGRRIGSKKMGSETRTPLMIASLFGSAKVLNYILLQKGGGVDVNRVCGSDRATALHCAVAGGSESSLEIVKLLLDAGADAECLDASGNKPVNLIAPAFDSLSKSRRKAMEMFLRGGGERDDELMSQEIQERKEAISDNKKEYPVDISLPDINNGVYGTDDFRMYNFKVKPCSRAYSHDWTECPFVHPGENARRRDPRKYPYSCVPCPEFRKGTCQKGDSCEYAHGVFESWLHPAQYRTRLCKDETGCARKVCFFAHKPEELRPVYASTGSAMPSPKSYSASGLDMTAMSPLALSSTSLPMPTVSTPPMSPLAAASSPKSGSMWQNKINLTPPSLQLPGSRLKAALSARDLEMEMELLGLESPARQQQQQQQQLIEEIARISSPSFRSKEFNRIVDLNPTNLDDLLASADPSVFSQLHGLSVQPSTPTQSGLQMRQNMNHLRASYPSNIPSSPVRKPSAFGFDSSAAVATAVMNSRSAAFAKRSQSFIDRGAATHHLGLSSASNSSCRVSSTLSDWSSPTGKLDWGVNGDKLNKLRKSTSFGFRNSGVTASPIAQPEFGAEPDVSWVHSLVKDVPSERSEIFGAEKQQYDLSKEMLPPWMEQLYIEQEQMVA

SEQ ID NO: 30060 - protein, 680 aa, Glycine max
  Clone ID: TF_GmC26_2.pep
MCSDSKSKLSSPTLVVMENSNIQKQNLDGLYNSVLLELSASDDYEAFKREVEEKGLDVNEAGFWYGRRIGSKKMGSETRTPLMIASLFGSAKVLNYILLQKGGGVDVNRVCGSDRATALHCAVAGGSESSLEIVKLLLDAGADAECLDASGNKPVNLIAPAFDSLSKSRRKALEMFLRGGGERDELMSQEMELQMFSVPEKKEGSDNKKEYPVDISLPDINNGVYGTDEFRMYNFKVKPCSRAYSHDWTECPFVHPGENARRRDPRKYPYSCVPCPEFRKGTCQKGDSCEYAHGVFESWLHPAQYRTRLCKDETGCARKVCFFAHKPEELPPVYASTGSAMPSPKSYSASGLDMTAMSPLALSSTSLPMPTVSTPPMSPLAAASSPKSGSMWQNKINLTPPSLQLPGSRLKAALSARDLEMEMELLGLESPARQQQQQQQQLIEEIARISSPSFRSKEFNRIVDLNPTNLDDLLASADPSVFSQLHGLSVQPSTPTQSGLQMRQNMNHLRASYPSNIPSSPVRKPSAFGFDSSAAVATAVMNSRSAAFAKRSQSFIDRGAATHHLGLSSASNSSCRVSSTLSDWSSPTGKLDWGVNGDKLNKLRKSTSFGFRNSGVTASPIAQPEFGAEPDVSWVHSLVKDVPSERSEIFGAEKQQYDLSKEMLPPWMEQLYIEQEQMVA

SEQ ID NO: 30061 - protein, 676 aa, Glycine max
  Clone ID: TF_GmC275_1.pep
MPPSNFPLRWESTGDRWWYASPIDYAAANGLYDLVTELLHLDTNLLIKLTSLRRIRRLEAVWDDESKFEDVARCRSKVARNLMIECETGRGHKHNSLILAGYGGWLLYTAASAGDVDFVLELLGRDPLLVFGEGEYGVTDMFYAAARGKNCEVFKLLLHSALSRKECLGGSEAELEEKLDEGSKVFKRDVMNRAIHAAARGGNWEILKQILASVSVSQVLSYRDSQGCTVLHAAAARGQVEVVRNLIESYDIINSANAQGNTALHVASYRGYLPVVEILIGASHSLATLTNHYGDTFLHMAVVGFRSPGFCRLDKHTELMKQLTSEKIVKMKDIINVRNNDGRTALHVAVVHNIQFDVVELLMSVPSIDLNICDADGMTPLDHLRQKSRSVSSEILIKQLISAGGISNYQDYVTRNALVKHLRTHGIGGSPGTSFRIPDSEILLYTGIENSCDDNYDQASVESNSWSSEINNYDTANSPCNSKSSSVNYGARHLKFLLQSSRRRDTKEAASDLEDDVSVNSFGSRNNLEDFPIPLRQRYSKMCSLPNNKRTLSIRTYLPSPSAKKHFHAGLVQGVIKVKPQMPLPVHSTSNLFQELSISSHSSNNKQKRVDIMGPSCSNRPMDGDGTLQLSYKQGSFNKKLMNRYFSFGAHGQALEDANSCTMSNGSSKHFSSLVA

SEQ ID NO: 30062 - protein, 1028 aa, Glycine max
  unsure (1)..(1028): unsure at all Xaa locations
  Clone ID: TF_GmC6578_1.pep
MRELLLAGADPNAVDDEGESVLHRAIAKKYTDCALVILENGGCRSMAILNSKNLTPLHHCVAIWNVAVVKRWVEVATSDEIAEAIDIPSPIGTALCMAAASKKDHENEGRELVRILLAAGADPSAQDSQNGRTALHTAAMTNDVDLVKVILGAGVDVNIRNVHNSIPLHLALARGAKACVGLLLDAGADYNLKDDDGDNAFHIAAETAKMIRENLDWLIVMLMKPDADIEVRNHSGKTLRDILEALPREWLSEDLMEALVNKGVHLFPTIFKVGDWVKFKRSVTTPTHGWQGAKPKSVGFVQSVPDRDNLIVSFCSGEVHVLANEVIKVVPLDRGQHVHLKEDVKEPRFGWRGQSRDSIGTVLCVDDDGILRVGFPGASRGWKADPAEMERVEEFKVGDWVRIRPTLTSAKHGLGSVTPGSIGIVYCIRPDSSLLIELSYLPNPWHCEPEEVEHVAPFRIGDQVCVKRSVAEPRYAWGGETHHSVGRISEIENDGLLIIEIPNRPIPWQADPSDMEKVEDFKVGDWVRVKASVSSPKYGWEDVTRTSIGVIHSLEEDGDMGVAFCFRSKPFSCSVTDMEKVPPFEVGQEIHVMPSVTQPRLGWSNESPXAVGKILRIDMDGALNVRVTGRQNLWKVSPGDAERLPGFEVGDWVRSKPSLGTRPSYDWNSVGRESLAVVHSVQDSGYLELACCFRKGKWITHYTDVEKVPSFKVGQYVRFRTGLVEPRWGWRGAEPESHGVITSIHADGEVRVAFFGLPGLWRGDPSDLEIEQMFEVGEWVRLNYNANNWKSIGPGSVGVVQGIGYEGDELDRSIFVGFCGEQEKWVGPSSHLERFDKLFVGQKVRVKQYVKQPRFGWSGHTHASIGTIQAIDADGKLRIYTPAGSKTWVLDPSEVEVVEEKELCIGDWVRVKASISTPTHHWGEVSHSSIGVVHRMEDEDLWVSFCFTERLWLCKAWEMEWVRPFKVGDKVRIRDGLVTPRWGWGMETHASKGQVVGVDANGKLRIKFRWREGRPWIGDPADLALDED

SEQ ID NO: 30063 - protein, 918 aa, Glycine max
  unsure (1)..(918): unsure at all Xaa locations
  Clone ID: TF_GmC6455_1.pep
RTRGRTRGRSRKARSRNHTLANSMPAVHIRTHDMLNPLERQFLDAAEKGNRPVLEACLAKQLRKAPLNINAVDTMGRTAIEIAVDNENLEIVQLLLRQPDVRIGNALLCAIREGVYELVEVLVNHPSITRDMLGEGWAKYLDPTETATSEYSSDISPVIMAAHLNQFEILQMLLRKDANIEKPHKHYCACEMCDSERINDGLHRSLKRINKYRALASPAWISLTSSDPILSAFKLSRELQKRAKVEDEFKDQYLQLAEQCKQYACDLLSQCRSTEEVMAVLNKEDNFCNEEVDLNAAKCSLARLKLAIKYEQKTFVAHPHCQQLLTSIWYEGFPLKRHRSSSLRTLLIALLLVLGWPLMAICYIAFPKSRVGEIVRSPFMKFLYYSTSFGCFLALLTMVTFEVHREQTGEVKGGTATRAADRGPTPTLIEWLVFIWVIGMLWSEIKQMWLEGFTKYIHQWWNWLDFVMVCLYLCTISIRFSAYSIYVMHNVGEQFTPRHVIRTHWNAFEPVLVSEALFAVGNVFXTNPYLGPLQISLGCMLVDVAKFCFIFVLIISSFSIGLAQLYWYYDSQTPVCLSSDRCKIVPNAFSSIASSYMTLLWSLFSITKVEDTEVVEAHHFTVWVGRGLFILYHMTSIIVLLNMLIAMMSHSFERINDHADLEWKFHRSKLWMAHFDEGSTLPPPFNIFPTPKAFIHTCRAIINVVNWCFGRYNYMAAKEGTRATIRRPGYSKRWHDMEGGLSGAPNGAGGTEPRKPITYTEIIQRLVSRFIHEQKKSMKMDGVNEDDLLEIKQDISSLRYELRDDRRKEIVRSLSHIDAVKREIMRSMSTTTRIFGNTPRRQLSVKERSVAEEADSELGDSSATEEGGTESIRSSLPFFDSLRSATLSPHPFITIAASGDKQFQYAERDAVAEPLRYR

SEQ ID NO: 30064 - protein, 199 aa, Glycine max
  Clone ID: TF_LIB4281-018-R1-K1-C4.pep
MKMTEEVKHDQQSITKEREEYTSMDNFRGIVVEGNRDDVLAISAAEGEDFHGSVVQGNWDDVIHMCENKGMLCKIMINASRGTALHVAVSEGNEVVVNRLVESMINHNMVEALELKDEKGDTPLHLAASRGLKHICECIIGPNYERKYLITIHNEEGETPLFQAALSWQKQAFMYLSSLMPDDENYSVLNSRNGDSILH

SEQ ID NO: 30065 - protein, 144 aa, Glycine max
  Clone ID: TF_GmC1577_1.pep
MLAIGKATSVDICRFFSKPGPYVSCDTMEFLLARYDGELDVDAVDSEGRTTIHVVVREGHTRVIRFCVTMGGNPNRVDSKGWTPLYYAAWKGHVKAAECLLECSNVKCVRDREGRRTFSVVAESEHEHSVIDKVQKETKSRAGF

SEQ ID NO: 30066 - protein, 291 aa, Glycine max
  unsure (1)..(291): unsure at all Xaa locations
  Clone ID: TF_GmC1240_3.pep
RLEGHNRTEIVKFLLDWQGADKVEMEAKNMYGETPLHMAAKNGCNKAAQLLLARGAIVEARANNGMTPLHLAVWYSLRAEEFLTVKTLLEYNADCSAKDDEGMTPLNHLSQGPGTEKLRELLLWHLEEQRKQRAIEACSETKAKMDELEKQLSNIVGLNDLKVQLRKWAKGMLLDEKRRSLGLHVGRRRPPHMAFLGNPGTGKTMVAXRILGKLLHTVGILPTDKVTEVQRTDLVGEFVGHTGPKTRRKIKEAEGGILFVDEAYRLIPMQKSDDKDYGLEALEEIMSVMDS

SEQ ID NO: 30067 - protein, 160 aa, Glycine max
  Clone ID: TF_GmC311_3.pep
MKVRNKSGDSGGHGSEAKGPMGPVFSTFVYEEEYGSDSQMEAIHGFAREGDMANLLKCIENGVSMNLKDSEGRTPLHWAVDRGHLNVTELLVGKNADVNAKDNDGQTPLHYAVTCEREAIAEYLLKHNADIYSKDNDGSSPRDICESNWPCMQHVGGEVN

SEQ ID NO: 30068 - protein, 591 aa, Glycine max
  Clone ID: TF_GmC178_1.pep
MIGVKMALTHSTSFPQMFQRAASAQFRRPLLHLVSTQESRHRYLTQCVPLHKAALKGDWKEAKKILDQDPTLELNSAITKGWATVLHIAVGANHESFVEELLKLMSREDLELQDIKGNTAFCFAAAVGNVHIAERMRIKNASLPMIRGGEGVTPLHLAVLQGRSEMARYLFDKTRETLYDDDWFQLFLICVNSRLYELALEMLNQKESLAFARGDNDETALHVLARKPLDCGCRSPLRYPKHVLHLCKNMKDPPVLKLTRRVWDIFLTLDDSKMMTAIREPSQVTFIAAEVGNFEFLSVIMSTYPDLIWELNTMGQSIIHVAALHRHASIFNLIHEIGPSKDLLLTFWDDEGSTLLHSVAEIAPTDRLNVVSGAALQMMLELTWFEEVKKNMQPSYIERPNHEGIVPRELFTEKHKELLKKGESWMKRTASSCMVVSTLIATGVFSAAFSVPGGTKDDSGSPNYLKKHLFTVFAISDALALTLSTASTLIFLSILISRYAEEDFLRSLPFKLIFGLVSLFLSIVSMMGAFSSAFFITYYHAKTWVVPITIAVFVLFPILLFIYLQFRLWHDIVYSHYMCGSLFRPRKRMIH

SEQ ID NO: 30069 - protein, 350 aa, Glycine max
  Clone ID: TF_GmC42_22.pep
MASDSKKDFPADDKAGTAENKASKDETSSKDSPAAQRATTATSGPATGFPGNPFDFSAMSGLLNDPSIKELAEQIAKDPSFNQMAEQLQKTFQGAPQDAMPSFDNQQYFSTMQQVMQNPNFMTMAERLGNALMQDPSMSAMLESFSNPSNKDQLEERMTRIKEDPSLKHILEEIETGGPAAMMRYWNDEEVLRKLGQAMGLANSGDVGASAENSGADETEDLGNEDESIVHHTASVGDVEGLKNALAAGADKDEEDSEGRTALHFACGYGEVKCAQVLLEAGAKVDALDKNKNTALHYAAGYGRKECVALLLENGAAVTLQNMDGKTPIDVAKLNNQNEVLKLLEKDAFL

SEQ ID NO: 30070 - protein, 548 aa, Glycine max
  Clone ID: TF_GmC1451_1.pep
MDTPNAQPQAASASTPRKKMTKQLTGKRDDTPLHSAARAGNMTVLKDTVGGTEEGELRVLLTKQNHAGETVLYVAAEYGYVDMVRELIQYYDLAGAGIKARNGFDALHIAAKQGDLDIVKILMEAHPELSMTVDPSNTTAVHTAALQGHTEIVKLLLEAGSNLATISRSNGKTALHSAARNGHLEVVKALLGKEPSVATRTDKKGQTAIHMAVKGQSLEVVEELIKADPSTINMVDNKGNTALHIATRKGRARIIKLLLGQTETNALVVNRSGETALDTAEKTGNSEIKDILLEHGVRSAKAIKAQPGTATARELKQTVSDIKHEVHYQLEHTRQTRRGVQGIAKRINKTHAQGLNNAINSTTVVAVLIATVAFAAIFTVPGQFADEPKDIPAGSGMTIGEANIAPQAAFLIFFVFDSIALFISLAVVVVQTSVVIIESKAKKQMMAIINKLMWLACVLISVAFLALSFVVVGKDQKWLAIGVTIIGTTIMATTLGTMSYWVIRHRIEASNLRSIRKSSMGSRSRSFSVSVMSDSELLNNDRKILYAI

SEQ ID NO: 30071 - protein, 491 aa, Glycine max
  unsure (1)..(491): unsure at all Xaa locations
  Clone ID: TF_GmC611_1.pep
MGNSFGCSASGERLVSAARDGDLVEAKMLLNCNPCLAKXVALLLENGADVNSRNYCGQTALMQACRYGHWEVAQTLLLFRCNVIRADYLSGRTTFHFAAVHGHVSSIRLVVADFVPSALYQAIHAGTDVDRGGGSNAKGKHEQSALSKFINKTADGGITALHMAALNGYFDCVQLLLDLNANVNAVTYHYGTSMDLIGAGSTPLHYGACGGNLKCCQILVAHGASRLALNCNGWLPLDIARMWGRHWLEQLLAPSSDATMPTFSHSNYLSLPLMSVLNIAREYGLQSSTASSDEIDFCAVCLERPCSVAAEGCGHELCVRCALYLCSTNNVSSEMVGPPGSIPCPLCRHGVVSFVKLPGSQAKENKLHVSLGLCTPCMLHPRDLDKPSLSHTPEVGRNRVASVPSEILCPVTCSPFPSMAIPLCTCNDGPCPSFEPREVETQDGLPHHSQASTVDQDKIEGPRLDKTTCSSMFWGRRSCSREHQCNSEINA

SEQ ID NO: 30072 - protein, 143 aa, Glycine max
  Clone ID: TF_LIB5118-026-A1-PF1-G11.pep
MIDPSIRLRRAIHAADAPLVKRILKSHPSLLHNPDAAPAGQSNSNLHLAASLGHRDICEALLAAGHEDPCPALNEAHQTALMLAAAAGHVDVVHLLCDHDASCILRRDARGRDAVMEASRGGHDTILQLLLTYVPGEPHVAGQ

SEQ ID NO: 30073 - protein, 440 aa, Glycine max
  unsure (1)..(440): unsure at all Xaa locations
  Clone ID: TF_GmC1462_1.pep
RCCCGCNLSDLRFCFRIISPTKNYTLQXSALDQMDWIEKITGVIASLLSSQIPERMLPASPMGSGHHRSTSESSSFESSDXDHYAGEECAADRSFTSAHLERPSRSLQQQRSCTKSEKPIDVLRRVCGNDKCADCGAPEPDWASLNLGVLVCIECSGVHRNLGVHISKVRSLTLDVKVWEPSVISLFQSLGNTFANSVWEELLQSRSAFQVDLVPTGLSTSDKPMMFFITKPCQSDSLSVKEKFIHAKYAEKLFVRKPKDNQYCLLVAQQIWEAVHANDKKAVYRYIVNSDVDVNAVYEPTCSSSLTLAKVMLLQEQTSHDHGSTLAGNTLDWSSTKEGQVMDNLEGCTLLHLACETADIGMVYGCEKTTANVNASDSRGQTPLHRCILKGRSTFARLLLSRGADPRAVDEQGRTPIELAAESNAGGDREVHAPLTDSSG

SEQ ID NO: 30074 - protein, 181 aa, Glycine max
  Clone ID: TF_GmC156986_1.pep
MCGVSKGKPSQIDLIMEEKYAKEGMHHKISALLEFSATDDLIGFKDAVEKEGHDVDGVGFWYGRRVGSKKIGYEERTPLMVASMFGSLDVSTYILGMGCIDVNRASRSDGATALHCAVAGGSAASVEVVKLLLDASGDVSAVDANGNRSIDLIVSVANSIFNQRSSVLQALLGGTSDADQA

SEQ ID NO: 30075 - protein, 158 aa, Glycine max
  Clone ID: TF_GmC797_5.pep
CGRVGGRVGGRVGVDVSSMFIVRKNGKTSLHNAARYGVHRIVKTLIARDPGIVCIKDKKGQTALHMAVKGQCTSVVEEILLADPSILNERDKKGNTALHMATRKCRSQIVGLLLSYSAVDVNAINKQQETALDLADKLPYGDSALEIKEALAEYGAKH

SEQ ID NO: 30076 - protein, 142 aa, Glycine max
  unsure (1)..(142): unsure at all Xaa locations
  Clone ID: TF_GmC16_2.pep
MGQSLSCSGNHDHGLFTAVLHGDLQIVTTLLDSDPSLLHQTTLYDRHSPLHIAAANGQIEILSRLLDGSLNPDVLNRHKQTPLMLAAMHGNIACVEKLLQAGANVLMFDTIYGRTCLHYSAYYXHSSCLKAILSAAQSNPVA

SEQ ID NO: 30077 - protein, 447 aa, Glycine max
  unsure (1)..(447): unsure at all Xaa locations
  Clone ID: TF_GmC130201_1.pep
MGQGLSCRGSHEHGLFRAVQHGDLDTVAALLQTHPSLMNHTTVYDHHSPLHIAAANGQIQVLSWLLDGSVNPDVLNRQKQTPLMLAAMHGKIACVEKLLEAGANVLMFDACYGRTCLHYAAYYGHSSCLKAILSAAQSSPVAASWGFARFVNIRDGRGATPLHLAARQRRPECVHILLYSGALVSASTGRYGCPGSTPLHLAAKXGSLDCIRELLAWGADRLQRDASGRIPYVVALKHRHGACAALLNLSSAEPLVWPSSLKIISELNPDAKELLERALMDANREREKNILKGSDYSLPSPSHSDGVDDNISEVSETELCCICFEQVCTIEVQDCGHQMCAQCTLALCCHNKPNPCTSRVIPPVCPFCRSTIARLVVVKKESPDDIDQDGVDITCSKHSKSRKSRNSNEGGSSSIKGLSNVNSFGKMGGRSSGKIAAENEWEDDKQQ

SEQ ID NO: 30078 - protein, 549 aa, Glycine max
  unsure (1)..(549): unsure at all Xaa locations
  Clone ID: TF_GmC6679_1.pep
SPRVGANKCAPIYSLAIRGEWKETEAMIDADRRLATSAISQGRATLLHVAAEANQLHFVKELVKLLSDEDLELQDRKGNTAFCLAAASGNVRIVKVMARRNSRLPTIRRGDGLTPLHMAALQGKNKMAWHLYHDTVQTFNDADWDALFFFCLKTDIYDLALKVLREKPRVALARNENQETGLHVLARKPSSFSCRXGLGQRFLYMLTNSGKSPTLALQLVKCLWETLLSLDGTEMQTIIKVISEPSQVIFIATEVGNFEVLAELVRSCPELMWEVDTKNRSIIHIAALHRHIDIYNLIHETSSIRNFVVTLEDEDKNNLLHYAAKLSPPSKLNLLPGPVLQMKFELMWYEEVKKIMQPCFIEMRNSNGKTPRELFTEEHLELVTKAESWMKSMINSCITISTVTATLVLATAFSIKREDNHKPTITRDFMLYIGIAMISSSISSLIFLSILITSPCVEEDFLKSLLRKIWWGLVTLYTSIAYLSTTFTIAFFTTYQVRVPKSFFWGPLISLLIMEYLLFPYGSLVNINPRYWLPSKYIFYTGKAKGRVN

SEQ ID NO: 30079 - protein, 243 aa, Glycine max
  unsure (1)..(243): unsure at all Xaa locations
  Clone ID: TF_GmC334_1.pep
MEMEVDIEKKQQDVVKEKDLFKAAEEGEASTFEALSSEILSKALSLRNEDARSLLHVAASSGHSQVVKIVLSCDASAGVVNCADEEGWAPLHSAASIGSVEIVETLLSKGADVNLKNNGGRAALHYAASKGWVKIAELLISHDPTITIKYYLXSTPLHRVARTGKSELCELLIAEREEVHAVDSAGHTPLMNTAICCKKQVAQLVIIHGADADLEDKEGYTVLGRATHEFRPILIDAAKAMLE

SEQ ID NO: 30080 - protein, 336 aa, Glycine max
  Clone ID: TF_GmC114164_1.pep
MMRLTMLLMHKNSAAGASLASQSEDSQKSLRDGIYSKEVVSVSKILRGIPGNDKCAECSAPDPDWASLNLGILLCIECSGVHRNLGVHVSKVRSITLDVRVWENTVLELFDNLGNAYCNSVWEGLLLLDHERLGESNVPMKPCSTDAFQHKEKYIQAKYVEKSLIIREEDIPGNPSVSIRIWQAVQAVNVREVYRLIVTSTSNLINTKYYDESHHAADAKGHQHDPEACLRVEETTETERCFRGWSLLHLACHSGSALMVELLLQFGADVNMCDYHERTPLHHCITSGKNQLAKFLLRRGARPSVKDAGGLTVLERAMERGAITDEELFILLAECQ

SEQ ID NO: 30081 - protein, 169 aa, Glycine max
  Clone ID: TF_LIB4164-037-R1-N1-H11.pep
EEDIPENPSVSIRIWQAVQAVNVREVYRLIATSTSNLINTKYYDEAHHAADAKGHQHGPEACLKVEETTETERCFRGWSLLHLACHSGSALMVELLLQFGADVNMCDYHERTPLHHCITSGKNQLAKFLLRRGARPSVKDAGGLTVLERAMERGAITDEELFILLAECQ

SEQ ID NO: 30082 - protein, 204 aa, Glycine max
  Clone ID: TF_GmC150_1.pep
MAVPGRRNGINDDEEELDDNALFEEQGVVEDDTDTPPHLRDLSAAAQIGDAHALRLALDNLTGSIDEPVEDGDTALHLTCLYGHLACVQLLIERGANIEAKDEEGAIPLHDACAGGFTEIVQLLLNRANDAEHIKRMLESVDSEGDTPLHHAARGEHIDVIRLLLSNGASPTKANLYGKAPADLPEQEDARRLLEAAALAMACQ

SEQ ID NO: 30083 - protein, 329 aa, Glycine max
  unsure (1)..(329): unsure at all Xaa locations
  Clone ID: TF_GmC1340_1.pep
MKEADEQLCEAAIKGDTKKVRSLIYSGADVTHFDGDGLNPLMHAAKHGHAPVLTLLLSVGAPWNALSPSNLSAGDYAMQEGHNETFELLLNAGIQSELILGTIARKANKNGDSGHDYLEDRVSFSEDKLMDSESKAVMMAWENPLMEAHAKAVCSGGGHVLNIGFGMGLVDXALQRYAPASHTIVEAHPGVYERMLRSGWGXKENVKIVFGRWQXDVLPQLETYDGIFFDTYGEYYEDLREFHQHLPALLKTGGIYSFFNGLCGSNAFFHVVYCHLVSLELENLGYSTQLIPLPVKDCLGEQVWEGVKQRYWQLDTYYLPVCQAIENPE

SEQ ID NO: 30084 - protein, 571 aa, Glycine max
  Clone ID: TF_GmC557_1.pep
MVLVITTCLPPPAKMHDENIEILSLNKLSGSLEKLLIEAEYDYCDAEILVEDIPVGIHRCILASRSQFFHELFKKGTDGSGKEGKPRYLMSDLMPYGTVGYQAFQVFLYYLYTGRLKASPTEETTCVDETCIHVACRPAINHALELMYASATFQMKELVLLFQRHLLNFVEKALVEDVIPILMAAFNCQLDQLLSRCIQRVARSDFDNTSLEKELPREVVTEIKLLRLPFQPESTPNAMEVESLNEKSIRRIHKALDSDDVELLKLLLNESSVTLDDAHALHYACAYSDSKVIQEVLSLGMADILRRNSRGYTVLHVAARRKDPSILVALLNKGACASDTTPDGQTALAICQRLTRYKDYQEQTVQCKESNKDRLCVDVLEREMRRNSMTVNMSVSSQLTADDLHMRLDYLEDRVAFARLLFPAEARVAIENAEADSSSLYANSSALKVTNGNPKEVDLNESPSARTRKLQLRLHALMKTVENGRRFFPHCSEVLDKFLEDDEMPDVFFLEKGSEEEQRIKKARFMELKDDVQKAFHKDMAENNHSGFSSTVSSSSSSTRREGLNHRVRRK

SEQ ID NO: 30085 - protein, 506 aa, Glycine max
  unsure (1)..(506): unsure at all Xaa locations
  Clone ID: TF_GmC611_3.pep
MGNSFGCSASGERLVSAARDGDLVEAKMLLNCNPCLAKYSTFGGLNSPLHFAAAKGHNEIVALLLENGADVNSRNYCGQTALMQACRYGHWEVAQTLLLFRCNVIRADYLSGRSALHFAAVHGHVRCIRLVVADFVPSAPYQAIHAGTAVDRGGGSNCSALSKFVNKTADGGITALHMAALNGYFDCVQLLLDLNANVNAVTYNYGTSMDLIGAGSTPLHYAACGGNLKCCQILVAHGASRLALNCNGWLPLDIARMWGRHWLEQLLAPSSDATMPTFSHSNYLSLPLMSVLNIAREYGLQSSTASSDEIDFCAVCLERPCSVAAEGCXHELCVRCALYLCSTNNVSSEMVGPPGSIPCPLCRHGVVSFVKLPGSQAKENKLHVSLGLCTPCMLHPRDLDKPSLSHTPEVGRNRVASVPSEILCPVTCSPFPSMAIPLCTCNDGPCPSFEPREVETQDGLPHHSQASTVDQDKIEGPRLDKTTCSSMFWGRRSCSREHQCNSEINA

SEQ ID NO: 30086 - protein, 232 aa, Glycine max
  Clone ID: TF_GmC61596_1.pep
MVGDFQVTMEKQSSFRASTMEKQKSFRGFMEKQKSFRIVMEKQLSFMGSERKKNKESPGKRGDLPIHLAARAGNLSRVKEIIQNYSNNETKDLLAKQNLEGETPLYVASENGHALVVSEILNYLDLQTASIAARNGYDPFHIAAKQGHLDSFVLRELLHSFPNLAMTTDLSNSTALHTAATQGHIDVVNLLLESDSNLAKIARNNGKTVLHSAARMGHLEVVKALLKDRTLD

SEQ ID NO: 30087 - protein, 186 aa, Glycine max
  unsure (1)..(186): unsure at all Xaa locations
  Clone ID: TF_GmC4222_4.pep
MESKNPARFTLGKQSSLAPERHNKEAELQKDGEAVDQGVRLMYSAFEGDVDGIREALESGVSVNYKDIDNRTALHVAACEGFTDVVDLLLQKGAEVDPKDRWGSTPLADAIFYKKXDVIKLLEKHGAKPLMAPMHVNHAREVPEYEINPKELDFTNSVEITKGTFCSALXGRGTKGAVKKLGXDVI

SEQ ID NO: 30088 - protein, 110 aa, Glycine max
  unsure (1)..(110): unsure at all Xaa locations
  Clone ID: TF_LIB3107-079-F6-R1A.pep
MPYVEGSVLVRILLAAGAGSSAQGSQDGWSALHTAAMADDVDLVRVIXGAGVDVSIRGVQISIPLHLALARGAKACVGRLLDAGAEYCLRDDDGDNAFHIAAVSASVLSR

SEQ ID NO: 30089 - protein, 196 aa, Glycine max
  unsure (1)..(196): unsure at all Xaa locations
  Clone ID: TF_GmC1577_2.pep
MDVTAIATAESIMPLTIRVGNLHTMKLLEAFDCKIDGLFLHEATTMVRIDAMEFLLARYDDELEVDVVDSEGRKTIHVAAREGHARVIXVLRRDGGNPNRVDSKGWTPLHYAAWKGHVKAAECLLECSNVKCARDREGRTAFSVAAESEHEQSHARTRLVDLLGWGDALLRAVRVDDVHGVKKCLGEGVSVNGRDQ

SEQ ID NO: 30090 - protein, 470 aa, Glycine max
  Clone ID: TF_GmC643_1.pep
MEVVVTPTLENDTITTLYEASLNGSVSTLNTLIQRNPLILHRVSLSPFSETPLHIASLLGHLEFCEALLKRKPSLASEVDSERRSPLHLACAEGHTEVVKALLHTNPDVCLAMDKDEMLPLHLAVMRGHTGVIKELTRARPGSIQQNTIDDGSVLHLCVRYNHLEALIFLVQSATRNQQQFLLAKDKEGDTVLHLAVRLKQIKTIKHLLMLPEMRTAISALNKAGLTALEMLERCPRDFISLKIEKMLLEAEVQTGTAQQGSPSPRIATQPSNQSKRSKIWETLWLKYLQYQSNWIEEKRGTLMVVATVIATMTFQSAISPPGGVWQEDTITGGHNCTTYGICKAGTAVLAYDWPHGFLKFMTFNTTSFFSSLAVVLLLISGFRLENKLMMWILTMGMTLALTFMGLTYFWAQSLVTPDHIVDKVNRMGIPLSIVWVIMLLVAVLVHGVNLFLWVKKYVKKWKKQKLLQS

SEQ ID NO: 30091 - protein, 512 aa, Glycine max
  Clone ID: TF_GmC611_2.pep
MGNSFGCSASGERLVSAARDGDLVEAQMLLNCNPCLAKYSTFGGLNSPLHFAAAKGHNEIVALLLENGADVNSRNYCGQTALMQACRYGHWEVVQTLLLFRCNVMRADYLSGRTALHFAAVHGHVRCIRLVVADFVPSALYQAIHAGTDVDRGGGSNAKGKHEQSALSKFINKTADGGITALHMAALNGYFDCVQLLLDLNANVNAVTYHYGTSMDLIGAGSTPLHYGACGGNLKCCQILVARGASRLALNCNGWLPLDIARMWGRHWLEQLLAPSSDASIPTFSHSNYLSLPLMSVLNIAREYGLQSSPTSSDEIDFCAVCLERPCSVAAEGCGHELCVRCALYLCSTNNVSSEMLGPPGSIPCPLCRHGVVSFVKLPGSQAKENKLHVSLGLCTPCILHPRDLDQPSLSHTPEIGRNRVASVPSEIRCPVTCSPFPSMAIPLCTCNDGPCPSFEPGEVETQDGSPHHSQASTVDQDKIEGPRLDKTTCSSMFWGRRSCSREHQCNSEINA

SEQ ID NO: 30092 - protein, 126 aa, Glycine max
  Clone ID: TF_LIB3242-391-P1-J1-F2.pep
KDSSTINEVGLWYGRQNGSKQFVLEHRTPLMVAATYGSIDVMKMVLLCPEADVNFACGANKTTALHCAASGGSTKAVDAVKLLLSAGADVNCVDANGNRPIDVIAVPPKLQGAKAVLEELFFGQCF

SEQ ID NO: 30093 - protein, 203 aa, Glycine max
  unsure (1)..(203): unsure at all Xaa locations
  Clone ID: TF_LIB4167-006-Q1-K1-B6.pep
MGNSFGCSASGERLVSAARDGDLVEAQMLLNCNPCLAKYSTFGGLNSPLHFAAAKGHNEIVALLLENGADVNSRNYCGQTALMQACRYGHWEVVQTLLLFRCNVMRADYLSGRTALHFAAVHGHVRCIRLVVADFVPSXFIKLYMLAQMLTXVGGSNAKGKHEQSALSKFIXXTADGGITALSYAALNGYFDCVQLLLDLMQM

SEQ ID NO: 30094 - protein, 172 aa, Glycine max
  Clone ID: TF_GmC1249_1.pep
MLEEQPVVLFRKSPSRRRLRSAFDTDDRGWTSLHVFARKGELKLVKKLINEGMDVNVSAWGPKSKGVTPLHLAAEGGHIGVMDVLLERGADIDARTKGACGWTPLHIAAKERRRDAVKFLLENGAFMPPDISDSRFNPPLHYCPGLEWAYEEMKRLRQEDLSAGETSYSSES

SEQ ID NO: 30095 - protein, 164 aa, Glycine max
  Clone ID: TF_GmC140986_1.pep
CLQFKPSKRPTFSAMLAIFLRHLQEIPRSPPASPDNGLDKGSVSNVMEPSPVPELEVPQENPNHLHRLVSEGDTAGVRDLLAKAASESGSNYLSMLLEAQNADGQTALHLACRRGSAELVETILECREANVDVLDKDGDPPLVFALAAGSPECVRSLIKRNANV

SEQ ID NO: 30096 - protein, 334 aa, Glycine max
  unsure (1)..(334): unsure at all Xaa locations
  Clone ID: TF_GmC798_2.pep
RSGSRLKYLLSRGVNPDLESDSGTPLVWAAGHAQPASVSVLLEHGANPNAETDDGITPLLSAVAASSLACLELLIQAGAKVNISAGGATPLHIAADNGSLELLNCLLKAGADPNVSDEDGVKPIQVGAARGYLKAVEILFPLTSKVDTIPTWTADGILEYMQSETRKQLDESINDQETNHPKEADFPKQNVPEVAPEAQMRAXAESKSRGDEAFKRYDYHMAIDSYTQAIDLNPTDATLLSNRSLCWIKLGQAEHALADAKACRALRPDWPKACYREGAALRLLQKFDEAANAFYEGVKLDPENKELVNAFREAVEAGRKFHGTRENMLLIPRS

SEQ ID NO: 30097 - protein, 261 aa, Glycine max
  Clone ID: TF_GmC555_3.pep
SSEIEVVEEVQSRDEQSAASGGGGDGMGAEESLRNDVYTAASYGDLEKLQRLVEQEGCPVTEPDGLGYYALQWAALNNRTAAAQYIIEHGGDVNATDHTGQTALHWSAVRGAIQVAELLLQEGARVSAADMNGYQTTHVAAQYGQTAFLYHIVSKWNADPDVPDNDGRSPLHWAAYKGFADSIRLLLFLDAHRGRQDKEGCTPLHWAAIRGNLEASTVLVQAGKKEDLMVTDNTGLTPAQLASDKNHRQVAFFLGNARRLL

SEQ ID NO: 30098 - protein, 63 aa, Glycine max
  Clone ID: TF_GmC27269_3.pep
GLSLLHLAAVFNQTDIVFILMDSGASLEYRNAQGETPLDCAPATLQYKMRKKMEEGGAVDQSI

SEQ ID NO: 30099 - protein, 85 aa, Glycine max
  Clone ID: TF_LIB3242-492-P2-K1-B6.pep
RGHQQLLKILLDNGADIDIQDEAGQTPLHYAAITDNIDIYKTLIRHRADPSVRDSDGNTPLDVASAETRDAIHEMSQSEPQPKGG

SEQ ID NO: 30100 - protein, 594 aa, Glycine max
  unsure (1)..(594): unsure at all Xaa locations
  Clone ID: TF_GmC555_1.pep
MSSEIEVVEEVQSRDEQSGAEESLRNDVYTAAAYGDLERLQRLVEQEGCPVSEPDGLGYYALQWAALNNRTAAAQYIIEHGGDVNATDHTGQTALHWSAVRGAIQAAELLLQEGAXSAADMNGYQTTHVAAQYGQTAFLYHIVSKWNADPDVPDNDGRSPLHWAAXKGFADSIRLLLFLDAHRGPQDTGGSNPIHXAGSLGNSXACSVQEQAGDYSEEGIGMMHMARSSNLANGDSHNHSEYARGNGNGHHVINVNSNSNRPNLLSTMRPWVLGVGLGMFYRCCQQXDPGYFRMNKHDYHETKDDDTLLKIDINNLALLAGNWSQLCATCKIVRPLRAKHCSTCDRCVEQFDHHCPWVSNCIGKKNKWDFFVFIVLEVLAMLVTGGVCLTRVXTDPLAPHSFGAWIQYVANNHIGAISFLIADFFLFFGVFTLTVVQASQISRNITTNEMANAMRYSYLRGPGGRFRNPYDHGIKKNCSDFLINGYNEDVECIEELGNSEEGIGMMHMARSSNLANGDSHTHTEYARGNGNGHHAINVDSNSNSTNSKIHHGHINGHVHSSHCSHNNHGKTRNDNVPLGLGLGLGRNRSVTASS

SEQ ID NO: 30101 - protein, 383 aa, Glycine max
  unsure (1)..(383): unsure at all Xaa locations
  Clone ID: TF_GmC125239_1.pep
ENTITLHTYSSFGQVSFFCNKPQTSMVEAHEFCKVLRLDKKSFTEILKIYFLDGRIVLNNLLEVKDLSLQRKLLESDFNLTIGNMETELAIRMNFAAHDGHLDLVKRLIGFGADPNKTDYDGRTPLHISASKGYVDISSYLVEQGVNINCADKFGTTPLLECIKNGHXEVASILVNAGAIFTIDDVGNFLCMTVARLLSGLFRRVLGRGVHPFPKNYDQRTPLHIAASEGLFTMAEVLLEAGASVLSKDRWGNTPLHEAHTGGDRNMIKMLEVAKASQLVELSNNIHETQGIYLMFATPTDEGSRKRCIVFPFHPWDDQKADRKEGVVLTVPQSIEELIKEATKHLEIPNASCILSEQCGKIVYVGTINNDEKLFLVSEAQNE

SEQ ID NO: 30102 - protein, 140 aa, Glycine max
  unsure (1)..(140): unsure at all Xaa locations
  Clone ID: TF_uC-gmroLIB3258P143a05b1.pep
MKFLSLVGNSFGCSASGERLVSAARDGDVQEAKALLEYNPRLARXVYLLLESGVDINLRNYRGQTALMQACQHGHWEVVQTLVIFNANIHKADYLNGGTALHLAALNGHTRCIRLILADYIPSVPNFWNALQTGDHKSIS

SEQ ID NO: 30103 - protein, 475 aa, Glycine max
  Clone ID: TF_GmC37725_1.pep
MESIAAQLKRGISRQFSSGSLRRNLSWQFTRQASLDPRRNNQRFSFGRQSSLDPIRRSPCSGNAELTVPENLDSTMQLLFMACRGDVKGVEDLLNEGIDVNSIDLDGRTALHVAACEGHVEVARLLLSRKANLDARDRWGSTAAADAKYYGNTEIYYMLKARGAKVPKTRKTPMTVANPREVPEYELNPVELQVRKSDGISKGTYQVAKWNGTKVAVKILDKDSYSDPDTINAFKHELTLLERVRHPNVVQFVGAVTQNIPMMIVREYHSKGDLASYLQKKGRLSPSKVLRFALDIARGMNYLHECKPDPVIHCDLKPKNILLDNGGQLKIAGFGTVRFSLISPDEAKLVQPEPNIDLSSLYVAPEIYKDEVFDRSVDAYSFGLIIYEMIEGTHPFHPKSSEEAVRLMCLEGKRPAFKIKTKHYPPELKELIEECWDPTPVVRPTFSQVIARLDKIVANCSKQGWWKDTFKLPWK

SEQ ID NO: 30104 - protein, 423 aa, Glycine max
  unsure (1)..(423): unsure at all Xaa locations
  Clone ID: TF_GmC6794_1.pep
TNRNFCTVLAIDNKIQEELFIPGGVIMDQRNVVDQLYFVGHGVLEEVATSEHGTAXTVSLLQPNSSLAEISILCYILXPYTDRVCXLSTLLRLYKQSFTNILDIYFYDGRKVLNNLLEGKESFLDKQLESVITFHIGKQEAELAXLKVNSAAFNGDMYQLKXLIRAGADPNKADYDGRSPLHLAASRGYEDITIFLIQERVDVNIIDNFGNTPLLEAVKNGHDRVASLLVKEGASMKIENAGSFLCTAVARGDSDYLKRLLSNGMDPNLKDYDYRSPLHVAAAEGLYFMAKLLLEAGASVFTRDRWGNTPLDEARMCGNKNLIKLLEDAKSSQLSEFPSQEFTDKMHPKKCTVFPFHPWDPKDNRRHGIVLWIPHSIEELIKSAAEQIEISGGSCILSEDAGKITDVDMIKDGQKLYLVHETH

SEQ ID NO: 30105 - protein, 291 aa, Glycine max
  Clone ID: TF_GmC262_1.pep
MARVRIDVDFPSPDAASQVGLLHKEIVGKAMIYKLSEAVEEGDGANFVKVLKQQCEENKLRLSDVFDKVTLAGHSLLHVAADMGQKSIVQVLCDLFPLLLIRRNVRGDTPLHVAARSKKYETVKLILSQYATKKSTYDEMKDKKITRETNECGNTPLHEAVYSGDVDVVKENFDQDKAVAYCLNKSKRSPLCLAVVNGNEQILELLLQIPLPADQPLSQCRRSSPLHTAVQHLELLLQIPLPADQPLSQCRRSSPLHTAIQHQKRVMILAIIEIRPELVYLRDEDGNTPLS

SEQ ID NO: 30106 - protein, 643 aa, Glycine max
  Clone ID: TF_GmC201_1.pep
RGSGFPGRPTRPRSGRTRGRTRGVNFACGANKTTALHCAASGASTKAVDAVKLLLSAGADVNCVDANGNRPIDVIAVPPKLQGAKAVLEELLSDNASDVSVGEFSVPVSVNSSSPGSPAHSSNGMPYTPSVSPPSPVAAKFTDAAICSLSEKAREYPIDPSLPDIKNSIYATDEFRMFSFKVRPCSRAYSHDWTECPFVHPGENARRRDPRKFHYSCVPCPDFRKGACRRGDMCEYAHGVFECWLHPAQYRTRLCKDGTSCNRRVCFFAHTAEELRPLYVSTGSAAPSPRSSASGPNVMDMAAAMSLFPGSPSSGSSISLSISFSLDPMSPSANGMPLSSAWAQPNVPALHLPGSNLQSSRLRSSLSARDIPPEDLNMMSDLDGQQQHHLNDLSCYIQPRPGASSVSRSGRSKTLTPSNLEELFSAEISLSPRYSDPAAGSVFSPTHKSAVLNQFQQLQSMLSPINTNLLSPKNVEHPLFQASFGVSPSGRMSPRSVEPISPMSARLSAFAQREKQQQQLRSVSSRDLGANSPASLVGSPANPWSKWGSPIGKADWSVNGDSLGRQMRRSSSFERKNNGEEPDLSWVQSLVKESPPEMIKEKFASPMPTASADGPNSNSQIESIDHSVLGAWLEQMQLDQLVV

SEQ ID NO: 30107 - protein, 541 aa, Glycine max
  Clone ID: TF_GmC58601_1.pep
MASSEIEVVSSSSSVSKPNNDQPPILDVFTASAHGDFNKLRTFVEQDGASVSLPDFSGYYALQWASLNNFHDIAHYLIQHGADVNAKDNMQQTALHWAAVHGSTLAADVLVENGARVEAADVNGYRAVHVAAQFGQTAFLNHIVVKYHADFDVPDNDGWSPLHWAAYKGFADTIRLLLFRDASQGRQDKDGCTPLHWAALRGNAEACTVLVHAGTKEELMVKDNSGNTPVQLAYDKGHRHVAPFLSNQQRASRNYWKGKLCSGIVTDIGYAPILFCTIIFLSILFINSVVAAPNLKKITAVVGLWAWTALSSAVGSLIMFYKCSSKDPGYIKRPGDLGTQSDTEDPLLNIDLNSSSVWMGNWSQLCPTCKIIRPVRSKHCPTCKRCVEQFDHHCPWISNCVGKRNKRDFFIFICLGTLTSSLSGAVAVQRIWTSKPALLAGETWIHYALVRHLGLVVFLVMDAVVFVATTTLTITQASMIARNVTTNELANSSRYDYLRGPDGRFRNPYNHGCWKNCADFFFLGYTNDDEIAWPPLQQVAT

SEQ ID NO: 30108 - protein, 453 aa, Glycine max
  unsure (1)..(453): unsure at all Xaa locations
  Clone ID: TF_GmC84_1.pep
IGNSQIGVSEILSCRNRSSIRVQVRRRKAMSSGSSSSHSSEKEKEKQRVSRTSLILWHAHQNDAAAVRKLLQEDPSLVKARDYDNRTPLHVASLHGWIDVATCLIEFGADVNAQDRWKNTPLADAEGAKKSNVIELLQSHGGLSFGQNGSHFEPKPVAPPLPNKCDWEVEPTELDFSNSVRIGKGSFGEILKAHWRGTPVAVKRILPSLSEDRLVIQDFRHEVNLLVKLRHPNIVQFLGAVTDRKPLHVITEYLRGGDLHQYLKEKGALSPATAINFSMDIVRGMAYLHNEPNVIIHRDLKPRNVLLVNSSADHLKVGDFGXLSKLITVQSSHDVYKMTGETGSYRYMAPEVFKHRRYDKKVDVYSFAMILYEMLEGEPPFASREPYEGAKYAAEGHRPHFRAKGYTPELQELTEQCWAHDMSQRPSFIEILKRLEKIKENLPTENHWHLFTS

SEQ ID NO: 30109 - protein, 127 aa, Glycine max
  Clone ID: TF_GmC84_6.pep
MSSGSSHSSEKEKEKQRVSRTSLILWHAHQNDAGSVRKLLQEDPSLVKARDYDNRTPLHVASLHGWIDVATCLIEFGADVNAQDRWKNTPLADAERAKKSNVIELLQSHGRLSFGQNGSHFEPKPVA

SEQ ID NO: 30110 - protein, 441 aa, Glycine max
  unsure (1)..(441): unsure at all Xaa locations
  Clone ID: TF_GmC201_3.pep
AFRSTVREKFHYSCVPCPDFRKGACRRGDMCEYAHGVFECWLHPAQYRTRLCKDGTSCNRRVCFFAHTAEELRPLYVSTGSAVPSPRSSASAPNVMDMAAAMSLLPGSPSSVXSMSPSPFGQPMSPSTNGISHSSNAWPQPNVPALHLPGSNIQTSRLRSSLSARDMPPEDLDVLQDFDGQQHLLNDLGCFSQPRPGAISVSRSGRSKTLTPSNLDELFSAEISSSPRYSDPAAGSVFSPTHKSAVLNQFQQLQSMLSPINTNLLSPKNVEHPLLQASFGVSPSGRMSPRSVEPISPMSSRISAFAQREKQQQQQQQLRSLSSRDLGANSPASLVGSPANPWSKWGSPNGKADWSVNGDTLGRQMRRSSSFELKNNGEEPDLSWVQSLVKESPPEMIKEKFASPMPTASADGPNSNSQIESIDHSVLGAWLEQMQLDQLVV

SEQ ID NO: 30111 - protein, 301 aa, Glycine max
  unsure (1)..(301): unsure at all Xaa locations
  Clone ID: TF_GmC770_2.pep
MASHSNQPGPGAEGQGEKDPFCEISPSPSPSSATAPALVLSNSGKRIDQAGKKKYVKQVTGRHNDTELHLAAQRGDVGAVRQILEDVDSQIMRTLSGGDDDVDLNAEIAEVRACLVNEENEPGETPLFTAAXKGHLDVVKELLNYSNAQTVSKKNRSGFDPLHIAASQGHHSIVQVLLDYKSXLSKTIGPSNSTPLITAATRGHTEVVNELLSKDCSLLEIARSNGKNALHLAARQGHVEIVKALLSKDPQLARRTDKKGQTALHMAVKGQSCDVVKLLLEADAAIVMLPLGLNKLYLLLL

SEQ ID NO: 30112 - protein, 204 aa, Glycine max
  Clone ID: TF_GmC150_2.pep
MAVPGRRNGMNDDEEELDDNALFEEQGAVEDDADTPPHLRDLSAAAQLGDVHALRIALDNLTGSIDEPVEDGDTALHLTCLYGHLACVQLLLERGANIEANDEDGAIPLHDACAGGFTEIVQLLLSRANDAEHIKRMLESVDSEGDTPLHHAARGEHVEVIRLLLSNGASPTKANLYGKAPADLPEQEAARRLLEAAALAMACQ

SEQ ID NO: 30113 - protein, 326 aa, Glycine max
  Clone ID: TF_GmC6697_1.pep
MVFFFPLKINCQVLSMLLDRNMNVDIVNHNNQTPLMYAAKQGKIDCVKKLIQAGANVFMIDSVHGGGCLHDAASHGHVDCLKAILFAAHFTAFEDSRGYLRFVDSRDFNGFAPLHLAALKGQSECVDALLDNDAILCARTSNCGGTALHLAARSGSLDCIRILLARGADRLQFDYHGNTPYTIALEHGQEECAALLGSTSGSSLVWPNHLRFIRELDKKTKALLEKALVELNKERQKAKNKPRSSRNSERNNNNIASMAGKKELCSICYDRVCTFVVRPCGHEMCAHCIMRLCQKKSDIDAPRSSNSKPVCPFCRGDIVRLLAKTK

SEQ ID NO: 30114 - protein, 120 aa, Glycine max
  Clone ID: TF_jC-gmX3055013C01sg22N19b1.pep
MKSTHDVMKKEITREKDDLGDTPLHEAVNNGDLSVLQVILHRDKDMVHELNKSRCSPLFLAAASGNVAIVNLLLDIPFSADQKLPLCFGNSPLHAAILKRNPGIPSNSHQITSLIFFPAH

SEQ ID NO: 30115 - protein, 343 aa, Glycine max
  unsure (1)..(343): unsure at all Xaa locations
  Clone ID: TF_GmC157145_1.pep
MEALVEVCEPAEVRIEFALNCKCRATVRIRSLTQTTPVAFKIQTSSPNKFLVNPPSGLIQPLSSATFQVILKPQSHLPHSYPRSPSDRFLVKTAEFCANSQSTRGSPSAPTGXTLDIKLKVAFVGPILLNDAVTRGDLDAVRNLIKRQRSMLAELSPTQAETLLGAATKLLNPDDMVHLLLEAGLRIIPNPNNAPDQVHVADTNTNINEGEEIFEASRNGHVAEVESLLRRCGGSVKYRDQYGLTAVHAAAFKGHKDVLMVLSELSDLDLECEDREGHVPLHMAVESGDVGTVKVLVEKGVNLNAVNKRGATPLYMAKIWGYDDICQLLVSRGALYSLTSTSG

SEQ ID NO: 30116 - protein, 427 aa, Glycine max
  Clone ID: TF_GmC84_3.pep
MSSGGGSSEAAAAAKEKEKEKARVSRTSLILWHAHQDDAAAVRKLLEEDPSLVKARDYDSRTPLHVASLHGWVEVANCLIEFGADVNAQDRWKNTPLADAEGAKRTAMIELLKSHGGLSYGQNGSHFEPSPVLPPLPNKCDWEVDPSELDFSNSVCIGKGSFGEILKAHWRGTPVAAKRILPSLSDDRLVIQDFRQEVNLLVKLRHPNVVQFLGAVTDRKPLMLITEYLRGGDLHKYLKDKGALSPSTAINFGLDIARGMAYLHNEPNVIIHRDLKPRNVLLVNSSADHLKVGDFGLSKLIKVQSAHDVYKMTGETGSYRYMAPEVLKHRRYDKKVDVFSFAMILYEMLEGEPPFSNYEPYDGAKYVAEGHRPSFRGKGYIPELRELTEQCWDADMKQRPSFIEIIKHLEKIKENLPSDHHWHLFTS

SEQ ID NO: 30117 - protein, 170 aa, Glycine max
  Clone ID: TF_GmC411556_1.pep
MDLDHLKGPFDDDPSWKERCNKRMEELKNTQFSSQDAASQQELLHKELVGEKIVLIPELYKAVEEGNVNKFLDVLEQECKQRKLNLSVIFEQVTETGDSLLHVAADKGKEKIVELICCHFPELLIRRNVRGGTPLHVAVRSKNSTMVNLILSQYASMKSTHDVMNDTEIS

SEQ ID NO: 30118 - protein, 172 aa, Glycine max
  unsure (1)..(172): unsure at all Xaa locations
  Clone ID: TF_GmC611_6.pep
MGNSFGCSASGERLVSAARDGDLVEAKMLLNCNPCLAKYSTFGGLNSPLHFAAAKGHNEIVALLLENGADVNSRNYCGQTALMQACRYGHWEVAQTLLLFRCNVIRADYLSGRTALHFAAVHGHVRCIRLVVADFVPSAPYQAIHXAQLLTGGGGSNVKGKHEHSALSKFVN

SEQ ID NO: 30119 - protein, 221 aa, Glycine max
  Clone ID: TF_GmC311_1.pep
GISYVLLLNIVCKLANKLTSFPVSSPFRRHAWQKLRAMPPEDAMQKYIDIVTEIYPTWLDGSSLRNKSGDSGGHGSEAKGPMGPVFSTFVYEEEYGSDSQMEAIHGFAREGDMANLLKCIENGVSMNLKDSEGRTPLHWAVDRGHLNVTELLVGKNADVNAKDNDGQTPLHYAVTCEREAIAEYLVKHNADIYSKDNDGSSPRDICESNWPCMQHVGEEVN

SEQ ID NO: 30120 - protein, 126 aa, Glycine max
  Clone ID: TF_GmC180289_1.pep
KEEEKKKENEERNLLRRGASPHVMDKDGAAPLHYAVQVGAKMTVKLLIKYKADVNVEDNEGWPPLHIAIQSRNRDIAKILLVNGADKTRKNKDGKTALDLSLCYGKDFKSYDLAKLLKTVPADSYL

SEQ ID NO: 30121 - protein, 526 aa, Glycine max
  unsure (1)..(526): unsure at all Xaa locations
  Clone ID: TF_GmC317_1.pep
RYIPKMMKKQLTGIRGDSPLQSAIRVGNLELVLEIISQSPEDELKELLSKQNNSFETALYVAAENGHLDILKELIRYHDIGLASFKARNGFDAFHIAAKNGHLEILKVLMEAFPEISMTVDLSNTTVLHTAAAQGHIEVVNFLLEKGNSLVTIAKSNGKTVLHSSARNGYLEVVKALVEXEPEIAMRIDKKGQTALHMAVKGQNLELVDELVKLNPSLANMVDAKGNTALHIATRKGRLQVVQKLLEXREINTDVINKSVETALDTAEKNGRLEIANFMQHLGAQSATSIKSLTTDTVLEHKQIVSDIISEVHXQLEHTIKTQRRMQGIAKRINKMHTEGLNNAINSNIVVAVLIATVAFAAIFNVPGQYPEKPSELSPGMSPGEAYIAPDIGFMIFIIFDSTALFISLAVVIVQTSVVVIERKAKRQMMAVINKLMWVACVLISVAFIAMSYIIVGDHKELAIAATALGTVIMAATLGTLCYWVIAHRLEASRLRSLRTTMSSRQSMSMSMMSGSENEYKTVYAI

SEQ ID NO: 30122 - protein, 157 aa, Glycine max
  Clone ID: TF_GmC315_1.pep
MGATEANTTLQARPETTSENIEALLDAARYDDMDDVKSLEASGVPLDSKDEQGRTALHMAAANGHIDIVEYLISRGVDLNSPNEEKNTPLHWACLNGHVEAVKKLIMAGANVSVLNSHERTPMDEAVSGGKPEVMDAINEAVALVELRGAMVFAQET

SEQ ID NO: 30123 - protein, 441 aa, Glycine max
  unsure (1)..(441): unsure at all Xaa locations
  Clone ID: TF_GmC6409_1.pep
MGQTLSCVQQHEDHGVLFPALASGELEVVEAMVEEDPTVLEHTIGCDRLSPLHVAAANGRIEVLSMLLDRSFNVDVLNRHKQTPLMLAVMHGKTGCVEKLIHAGANILMFDSIRRRTCLHYAAYYGHIDCLKAILSAAHSTPVADSWGFARFVNIRDGNGATPLHLAARHRRSECLHALLDNGALVCASTGGYGYPGSTPLHMAARGGSLDCVRMLLAWGADRLQLDSSGKIPFSVALKHKHCACAXVWPSPLKFISELNQEAKALLEKALQEANREREKTILKETDMPPSPLNSESEDDNIASEASDMELCCICFDQACTIEVRPCGHQMCAHCTLALCCHKKLDPATTGLSGPXLATCVDPFFSLCILRLTQFQDTVAKINKISDTEVESGPMKPRRSRKSNFSEGSSSFKSLSAMGSFGRIAGRNSGKITDEKQWEVS

SEQ ID NO: 30124 - protein, 273 aa, Glycine max
  unsure (1)..(273): unsure at all Xaa locations
  Clone ID: TF_GmC6409_2.pep
HXAARYIWPECLHALLDNGALVCASTGGYGYPGSTPLHMAARGGSLDCVRMLLAWGADRLQLDSSGKIPFSVALKHKHKACAALLDPSSAAPLVWPSPLKFISELNQEAKALLEKALQEANREREKTILKETDMPPSPLNSESEDDNIASEASDMELCCICFDQACTIEVRPCGHQMCAHCTLALCCHKKLDPATTGLSGPVCPFCRGSILQLLVAKINKISDTEVESSPMKPRRSRKSNFSEGSSSFKSLSAMGSFGRIAGRNSGKITDEKQ

SEQ ID NO: 30125 - protein, 903 aa, Glycine max
  Clone ID: TF_700838909_FLI.pep
MRELLLAGADPNAVDDEGESVLHRAIAKKYTDCALVILENGGCRSMAILNSKNLTPLHHCVAIWNVAVVKRWVEVATSDEIAEAIDIPSPIGTALCMAAASKKDHENEGRELVRILLAAGADPSAQDSQNGRTALHTAAMTNDVDLVKDDDGDNAFHIAAETAKMIRENLDWLIVMLMKPDADIEVRNHSGKTLRDILEALPREWLSEDLMEALVNKGVHLFPTIFKVGDWVKFKRSVTTPTHGWQGAKPKSVGFVQSVPDRDNLIVSFCSGEVHVLANEVIKVVPLDRGQHVHLKEDVKEPRFGWRGQSRDSIGTVLCVDDDGILRVGFPGASRGWKADPAEMERVEEFKVGDWVRIRPTLTSAKHGLGSVTPGSIGIVYCIRPDSSLLIELSYLPNPWHCEPEEVEHVAPFRIGDQVCVKRSVAEPRYAWGGETHHSVGRISEIENDGLLIIEIPNRPIPWQADPSDMEKVEDFKVGDWVRVKASVSSPKYGWEDVTRTSIGVIHSLEEDGDMGVAFCFRSKPFSCSVTDMEKVPPFEVGQEIHVMPSVTQPRLGWSNESPATVGKILKIDMDGALNVRVTGRQNLWKVSPGDAERVPGFEVGDWVRSKPSLGTRPSYDWNSVGRESLAVVHSVQDSGYLELACCFRKGKWITHYTDVEKVPSFKVGQYVRFRTGLVEPRWGWRGAEPESHGVITSIHADGEVRFAFFGLPGLWRGDPSDLEIEQMFEVGEWVRLNYNANNWKSIGPGSVGVVQGIGYEGDELDRSIFVGFCGEQEKWVGPSSHLERFDKLFVGQKVRVKQYVKQPRFGWSGHTHASIGTIQAIDADGKLRIYTPAGSKTWVLDPSEVEVVEEKELCIGDWVRVKASISTPTHHWGAIHVLMLINRRGGRMEAVEIGKLSC

SEQ ID NO: 30126 - protein, 648 aa, Glycine max
  unsure (1)..(648): unsure at all Xaa locations
  Clone ID: TF_GmC770_1.pep
MPGSLILPLALSQLALLPPIPPFIFRISQLSPIIPTPKTNSSSYSYPLFLTSTIAMASHSNQPGPGAEGLGEKDPPTSFQNPLSEISPSPSPSSAPAPALVLSNSGKRIDQAGKKKYVKQVTGRHNDTELHLAAQRGDVGAVRQILEDVDSQIMGTLSGDGDEDDLNAEIAEVRACLANEENELGETPLFTAAEKGHLDVVKELLNYSTAQTVSKKNRSGFDPLHIAASQGHHPIVHVLLDYDPGLSKTIGPSTSTPLITAARRGHTVLVNELLSKDCSWFDITRSYGKNAWHCAVRQVHVXEIVKALISIEPQLARRTDKKMQIALHMAVKGQSCDVVKLLLEADAAIVMLPDKFGNTALHVATRKKRVEIVNELLHLPDTNVNALTRDHKTALDIAEDLPLSEEASDIKDCLSRYGALRANELNQPRDELRKTVTQIKKDVHTQLEQTKRTNKNVHNISKELRKLHREGINNATNSVTVVAVLFATVAFAAIFTVPGGDDDDGSAVVAAYAAFKIFFVFNAIALFTSLAVVVVQITLVRGETKAEKRVVVVINKLMWLASVCTSVTFIAASYIVVGKKNEWAAILVTLVGGVIISGVIGTMTYYVVRSKRSRSMRKKEKQAARRSGSNSWHHSEFSNSEVDPIYAL

SEQ ID NO: 30127 - protein, 614 aa, Glycine max
  unsure (1)..(614): unsure at all Xaa locations
  Clone ID: TF_GmC540_1.pep
RASGEVAQKLLLESESKRGKNSLIRAGYGGWLMYTAASAGDLGFVQVLLERNSLLVFGEGEXSVTDILYAAARSKNCEVFRLLFDFAVSPRFLSGKGGIMEENVGDIPSVYRWELTNRAVHAAARGGNLKILEELLANCSDVLAYRDADGSTVLHAAAGRGQVEVIKYLTSSFDMINSTDHQGNTALHVASSRGQLPTAEALVSAFPSLMSLRNNSGETFLHRAVSGFKSHAFRRLDKQVELLRNMLSGKNFHVADIINVKNNDGRTALHMAIIGNIHTDLVQLLMTAPSINVNICDVDGMTPLDYLRQHPKSASSDILIKKLISAGGMFGCQGHSSRKAIASHLRMQSIGSSPGTSFRVSDTEMFLYTGIENVSDASGDHGSGGMSSSSSEHIPYDLNATENRVPIAAKRPSTVNHAAASLKRVLLWPRVKDKKSEGFKKSSTTDEGSVDSCRKRNNSFDETPTPLRQRFSRPSSLPNNKRTLSVRSQQSSPNAKKRFASGPVHGVIQSMPHANVSGRSRSSSFSKSSISSPRSIDKQKGIFIDNDIAGPSCSSQPSPPPDDDESPKLVKRTSVGRKLRDHYFCFGAPGINVKNSVHRQQESQSYKAHVVAVA

SEQ ID NO: 30128 - protein, 484 aa, Glycine max
  Clone ID: TF_GmC1240_2.pep
MNNINNNRSQDQRSRPAKAATIHGCALSGDLVGLQRLLRDNPSLLNERNPVMAQTPLHVSAGHNRTEIVKFLLDWQGADKVEMEAKNMYGETPLHMAAKNGCNKAAQLLLARGAIVEARANNGMTPLHLAVWYSLRAEEFLTVKTLLEYNADCSAKDDEGMTPLNHLSQGPGTEKLRELLLWHLEEQRKQRAIEACSETKAKMDELEKQLSNIVGLNDLKVQLRKWAKGMLLDEKRRSLGLHVGRRRPPHMAFLGNPGTGKTMVARILGKLLHTVGILPTDKVTEVQRTDLVGEFVGHTGPKTRRKIKEAEGGILFVDEAYRLIPMQKSDDKDYGLEALEEIMSVMDSGKIVVIFAGYSKPMKRVITSNEGFCRRVTKFFQFNDFNSEELAQILHIKMNNLAEDSLLYGFKLHTDCSIKSLAALIERETTEKQRQETNGGLVDTMLVNARENLDLRLSFDCMDTEELLTITLVDLEAGLQLLTQ

SEQ ID NO: 30129 - protein, 365 aa, Glycine max
  unsure (1)..(365): unsure at all Xaa locations
  Clone ID: TF_GmC303801_1.pep
TKRLSQILRLNRTTFINLVHSNIGDGAIVMNNFLQHLQESRYPGMDVILAETEAMLARGKMDMPITTCFAVTRNDDLLLHRLLKRGSDPNELDRSGKTALHIAASKGNEHCVNFLLEYGADPNSKDMDGSVPLWEAMKGRHESVMKILIDNGADISFADAXHLACSAVEQNXVGIAQEIIPCGMDVTQPKKNGATALHTAVVEGNTEMINFLVDQGADIDMQDVNGWTPRVLAEQSESEEIKNIFHDIKDSRKPGVIPISKNDNRSGRFQIDPSMLTIPQESMLLPPYDGRRRSSSSFDNSIFGMMSTANRAKKDLQASESRSTRRSVNGLARVTLSCPEKGEHAGKLVLLPKTLEKLLEFGARK

SEQ ID NO: 30130 - protein, 190 aa, Glycine max
  unsure (1)..(190): unsure at all Xaa locations
  Clone ID: TF_GmC465104_1.pep
MEEFEDAVSFVSKNSGMKTSQDDKLRFYSMYKLATVGPNDTPRPGFFDFAGRAKWDAWKSCGELSPEDAKTEYVKLLDRLDPKWRETLPNLPKHSKAQSNNEDVGGPVFSMPQFEEEIIPEEDRTLAYYVSSGEDSKVLELIATAHNKTSLIDKRDKDGIAAIHYACDRGHQQLXKILLDNGADIDIPDE

SEQ ID NO: 30131 - protein, 125 aa, Glycine max
  unsure (1)..(125): unsure at all Xaa locations
  Clone ID: TF_GmC611_5.pep
MGNSFGCSASGERLVSAARDGDLVEAKMLLECNPCLAKYSTFGGLNSPLHFAASKGHNEIVALLLENGADVNSRNYWGQTALMQACRYGHWXKVVQTLLLFRCXVGKADYLSGGTXFYFAAINGA

SEQ ID NO: 30132 - protein, 251 aa, Glycine max
  Clone ID: TF_GmC614_1.pep
MSTFATRSLVSVESTTTIEGTEADNVDSDSLFRGCVLEGRWDFVLTAYRNDSNYHKIKINESRGTALHVAVNDGKVELVNTLVVAILNHEGREVLRDDSALKTTNERGDTPLHLASSRGFIGMCKCIIGELKERKDLIRVRNNKGETPLFRAVLTCHTKTFVYLHHVSKDIDVPLRNYDGDTILHHAIWREFLDLAIIIIHCYPGLVEMRNKDGATPLKVLACKPSAFRSGINLPWWKKILYYGKCCVRGG

SEQ ID NO: 30133 - protein, 267 aa, Glycine max
  unsure (1)..(267): unsure at all Xaa locations
  Clone ID: TF_GmC755_1.pep
RRDSPPPKLNYRHVIXRHRWTGRYEAHLWDKNCWNESQSKKGRQGAYDDEEAAARAYDLAALKYWGQDTILNFPLSNYEEKLKEMEGQSKEEYIGSLRRKSSGFSRGVSKYRGVARHHHNGRWEARIGRVFGNKYLYLGTYATQEEAAAAYDMAAIEYRGLNAVTNFDLSRYINWPRPKTEENHQTIPSNENVNSNAELELGSASDEITEEGVAPSSESNPSRRTFPEDIQTIFENQDSGIYTENDDIIFGDLGSFGAPIFHYELDV

SEQ ID NO: 30134 - protein, 119 aa, Glycine max
  Clone ID: TF_GmC6107_6.pep
DWNKYDECVNATASVDKSVKVWDVRNYRVPLCVLNGHGYAVRKVKFSPHVRNLMVSCSYDMTVCVWDFMVEDALVSRYDHHTEFAVGVDMSVLVEGLMASTGWDELVYVWQHGTDPRAP

SEQ ID NO: 30135 - protein, 92 aa, Glycine max
  Clone ID: TF_GmC1178_4.pep
MSRFMNAPSSPGLSPLFGVGHKRAREDDTGAGASVGLGVVAAASSQTQGNESGGGERRRRYRRVRQRPWGKWAAEIRDPHKAARVWLGTFDT

SEQ ID NO: 30136 - protein, 77 aa, Glycine max
  Clone ID: TF_701208549_FLI.pep
KQLCHKVGVKREREEESERKNNYEKSEFNNNSNSNKHVKKEECPLTPSCWKGFWDTDVMGTIFSVPPLSPLSPLMVV

SEQ ID NO: 30137 - protein, 55 aa, Glycine max
  unsure (1)..(55): unsure at all Xaa locations
  Clone ID: TF_5760111.pep
RYTGIRMRXCGKWFDEIRARNMRSMIWLASYSTPVAAVRAYDTVVCDVLGPCARL

SEQ ID NO: 30138 - protein, 172 aa, Glycine max
  Clone ID: TF_jC-gmXLIB3563P053ac08a2.pep
MANSLEVSALNRIKLHLLGELSPLPLTTSSQSSSICSQSSCSDSSATLDQIFSEFLYFPTSSSENHFSALEFEAKPEIIYLETPNPQLEFTSLTTQDSKKPQSSRKPSLQISLPKKTEWIQFGDPEVTETVSQSNPNAEEKKHYRGVRQRPWGKFAAEIRDPNKRGSRVWLG

SEQ ID NO: 30139 - protein, 39 aa, Glycine max
  Clone ID: TF_7639988.pep
RVMQRTWGKWAAEIREPNIGYMLWLGTFPTVIGAALAYD

SEQ ID NO: 30140 - protein, 111 aa, Glycine max
  unsure (1)..(111): unsure at all Xaa locations
  Clone ID: TF_7478255.pep
MLSCXYIYLGLFNSEIXTARAYNKAXIXCNGREAVTNFXPSTYKSKMKPKAINESGXHNLNLSLGIATPRHGPKKNGHLQFSIPYNIHPRKSSMIETNINSVIDNPSLKRL

SEQ ID NO: 30141 - protein, 42 aa, Glycine max
  Clone ID: TF_7326474.pep
HPLFRGVRKRRWGKWVFQIREPRKKSRIWVGFFPAPENGGKG

SEQ ID NO: 30142 - protein, 101 aa, Glycine max
  unsure (1)..(101): unsure at all Xaa locations
  Clone ID: TF_LIB4128-090-Q4-K1-D1.pep
IPQRPWGEGAAXIPDPREGGPVXVXTFXTAEKAAKAYHAXARGGPGXRAXVSFPEEPSGAASSKRVKGSPEGQPMRKNPSSVRPRINQRCNFENRGLLQAY

SEQ ID NO: 30143 - protein, 98 aa, Glycine max
  unsure (1)..(98): unsure at all Xaa locations
  Clone ID: TF_19935601.pep
ITVHPEKNEGNVFFFKKRHWGRYSAKIINPGNKNRAWIGTVYTLXDAKCDYDDTDLEFLGPKDKTNLPLPYENVNNSNPRQRTNNQTSSRHCDINTDN

SEQ ID NO: 30144 - protein, 197 aa, Glycine max
  unsure (1)..(197): unsure at all Xaa locations
  Clone ID: TF_GmC289_1.pep
SCIVVEVRRGRTAAAAAAVVDPTPDQAKETTRFRGVRKRPWGRFAAEIRDPWKKQRVXRPKPISPPSPAPQRRTTTRRFPLYQAHGLSTKFEPVVQVNRPTSSGMSSTVESFSGPRVPSSSSRAKPLVVVVNPIIPLNDDEDDCHSDCDSSSSVVDDGQDCVLISSFRQPLPFDLNLPPSDADDDNDDDLPATALCL

SEQ ID NO: 30145 - protein, 228 aa, Glycine max
  Clone ID: TF_GmC15818_1.pep
MVSLRRRRLLGLCSGNSSFVTPLPLYCENLSGFENSNQQAKPKSEQPALSDDASNPDSNNAVQEEPGSSNASGSSSSKEQLIQQITGPPIKRRKRHRRKNLHNQEQCIMRGVYFKNMKWQAAIKVDKKQIHLGTLGSQEEAAHLYDRAASMCGREPNFELPEEEKRDLSKFKWDEFLAMTRQAITRKKHKRRLSPGPGNSHDMLPLSKDDWDTKQGVIEDAEQETSVS

SEQ ID NO: 30146 - protein, 129 aa, Glycine max
  Clone ID: TF_GmC5695_1.pep
PPALTLPILRHLLPPLPLQQTLRQPRLQIHQRSRPSQRHQGHHSLVPESQKPNKRTMRIFCKVIRDPSKYRRKRGFEWEPSILPRKLLEPTTPPLGLSEVPSQNKNPSLTFLLQPHHRSFLLRGFPHLP

SEQ ID NO: 30147 - protein, 85 aa, Glycine max
  Clone ID: TF_LIB3242-503-P1-J1-B10.pep
MFSINHFSAPDANSPGSGSGTSRPVPALSDEDYFLAASNPKKRAGRKKFRETRHPVYRGVRRRDSGKWVCEVREPNKKSRIWLGT

SEQ ID NO: 30148 - protein, 107 aa, Glycine max
  unsure (1)..(107): unsure at all Xaa locations
  Clone ID: TF_jC-gmX3027002H12sg1M2a1.pep
KPTRNNKARHPTPKHKQTGGTRNENDRQDTDTHQERHEANXSTNTTPPQPTRNRTKKHHRGARRRPRGKDAXETRDTARHGARTGHGTTQTXEEXAXAXDRAAHKKR

SEQ ID NO: 30149 - protein, 180 aa, Glycine max
  unsure (1)..(180): unsure at all Xaa locations
  Clone ID: TF_LIB4167-034-R1-N1-C6.pep
FIILVAGTEEEAAEAYDIAAIKFRGLNAVTNFDMSRYDVKAILESNTLPIGGGAAKRLKEAQALESSRKREEMIALGSSTFQYGTTSSNSRLHAYPLMQHHHQFEQPQPLLTLQNHDISSHFSHQQDPLHQGYIQTQLQLHQQQSGGSSSYSXQNNNINNAQFYNXYNLQNHPALLQGMI

SEQ ID NO: 30150 - protein, 210 aa, Glycine max
  unsure (1)..(210): unsure at all Xaa locations
  Clone ID: TF_GmC12225_4.pep
MNNNWLSFPLSPTHSSLPAHDLQATQYHQFSLGLVNENMENPFQNHDWSLINTHSSSEVPKVADFLGVSKSENESDLAASLNEIQSNDSDYLFTNNSLVPMQNPAVDTPSNEYQENANSSLQSLTLSMGSGKDSTCETSGDNSTNTTTTTTVEAAPRRTLDTFGQRTSIYRGVTRHRWTGRYEAHLWDNSCRXREGQSRKGRLRNLSKLF

SEQ ID NO: 30151 - protein, 124 aa, Glycine max
  unsure (1)..(124): unsure at all Xaa locations
  Clone ID: TF_LIB3242-364-Q1-J1-B6.pep
STSTRFSIAYLPISEASSSASNEKLXHSVEGXXPMLSFGKSVSQILEPKKKNRIWLGTFATANIATRAHDIXSLSIKSNSSILNFPXLISYLPRPDSNSPIDIHSATAKSTPIEVNDSPTTPTS

SEQ ID NO: 30152 - protein, 159 aa, Glycine max
  unsure (1)..(159): unsure at all Xaa locations
  Clone ID: TF_GmC1505_2.pep
MGTAIGMYSNNNIVPDFLDPYSEELMKALMPFMKSDYFSASSSSSSRESHPSPLIPSNSLPSSNQIRLNQLTQDQILQIQAQIHIQQQHVAQGQAHLGPKRVPMKHAGTAAKAAKLYRGVRQRHWGKWVAEIRLPXNRTRLWLGTFDTAEEATLAYDNA

SEQ ID NO: 30153 - protein, 204 aa, Glycine max
  Clone ID: TF_GmC92576_1.pep
NSRIRGRGTLTPRSGEIGTPSLRGVRKWFGVSNTAEEAALVYDNAPTRRRRPRARTYVTAPLAAVVSHNAALLPPAPLALTSVITPPAREETHCNSKNIFSPTSVLHCCSLSEEAESVTAKDDDYSSVSENKVKAESAFPPEIDFEFRACSTVPESLLFCDDDWSSEFLNSYEDFGFKSWHTDRNRDFFQDIDDLFVSDPLLAL

SEQ ID NO: 30154 - protein, 37 aa, Glycine max
  unsure (1)..(37): unsure at all Xaa locations
  Clone ID: TF_jC-gmXLIB3564P109bh09b1.pep
IKIMKWGKWVAVIIXPNKRARIWFGVYTTPLNGAGAY

SEQ ID NO: 30155 - protein, 183 aa, Glycine max
  Clone ID: TF_GmC144838_1.pep
MDIHSNHGATSEGILENVWAKIMSSDRADGRKGDAAECSNSWEELPNLDGREGSMEILQRLPSLGRWISMGADFWEEVLEGIILPNTSNTEYSGSNNNLEIGSANETHNKVGDAVRIEKSVTKHYRGVRRRPWGKYAAEIRDSSKKGARVWLGTFDTAEEAALSYDKAALRIRGPKAYLNFPL

SEQ ID NO: 30156 - protein, 160 aa, Glycine max
  Clone ID: TF_GmC32_1.pep
MEEAGLGDCCSSNSTITRKSDKRKQQHQQQEKPYRGIRMRKWGKWVAEIREPNKRSRIWLGSYATPVAAARAYDTAVFHLRGPSARLNFPELLSQDDDVSTQQQGNMSADSIRKKATQVGARVDALQTALQQSSSSHSANSSHVSSSDKPDLNEYPKPED

SEQ ID NO: 30157 - protein, 159 aa, Glycine max
  Clone ID: TF_GmC32_2.pep
MEEAGLGDCCSSNTTITRKSEKRKQQHQQQEKPYRGIRMRKWGKWVAEIREPNKRSRIWLGSYATPVAAARAYDTAVFHLRGPSARLNFPELLSQDDDVSTQQQGKMSADSIRKKATQVGARVDALQTALQQSSSTHSISSSHVSYEKPDLNEYPKPED

SEQ ID NO: 30158 - protein, 208 aa, Glycine max
  Clone ID: TF_GmC268_2.pep
MVKEKKNVVVKNKKPNNNADELHFRGVRKRPWGRYAAEIRDPGKKTRVWLGTFDTAEDAARAYDAAARNFRGPKAKTNFPVPPDDNNNNNVNVNKNKSVNVKSHSPSQSSTVESATPEREATRRSTSAAIDRFPFLPIQQQILMTHPVAAPMRPVFFLDRAHFMTQSFPLRFEPGPVQSDSDSSSVVVDCQPKRELNLDLNLAPPNEY

SEQ ID NO: 30159 - protein, 302 aa, Glycine max
  Clone ID: TF_GmC97_1.pep
MAALMDFYSSSPEFQLHSDPFRGELMEVLEPFMKSPSPNYFPSSPSLPNLYSNGLSSNTQSLIGFGQAQPTSLVGLNHLTPSQISQIQAQIQIQAQQHQNRSNTLSFLGPKPIPMKHAGMPPKPTKLYRGVRQRHWGKWVAEIRLPKNRTRLWLGTFDTAEEAALAYDKAAYKLRGDFARLNFPNLRHQGSSVGGDFGEYKPLHSAVDAKLQAICEGLAELQKQGKTEKPPRKSRSKLAEKVVSDKENNNSCKVEAASWSSEGSSPLSDLTFADVSEAQWEGDSDNYNLQKYPSYEIDWDSL

SEQ ID NO: 30160 - protein, 314 aa, Glycine max
  Clone ID: TF_GmC97_2.pep
MAAMMDFYSSSTEFQFHSDPFRGELMEVLEPFMKSPFSTPSPSNSCFLSTSYSPSPNNYSPSLYSNGLSSIPNTTQNLIGFGQGQPTSLVGLNHLTPSQISQIQAQIQIQNHSNTLSFLGPKPIPMKHVGMPPKPTKLYRGVRQRHWGKWVAEIRLPKNRTRLWLGTFDTAEEAALAYDKAAYKLRGDFARLNFPNLRHQGSSVGGDFGEYKPLHSAVDAKLQAICEGLAELQKQGKTEKPPRKTRSKLASPPENDNNNDNNSCKVEAASSSSEGSSPLSVLTFADVSEPQWEGDSDNFNLQKYPSYEIDWDSL

SEQ ID NO: 30161 - protein, 503 aa, Glycine max
  Clone ID: TF_GmC307_1.pep
MWNLNDSPDQRKDYESEGCSSSLNDDKGKRVGSVSNSSSSAVVVEDGSEEEDSERGGSRTLDKKTNKIFGFAVAHDDSDHPPVTHQFFPVEDSELPVSAAAAGSGGGGGGSSFPRAHWVGVKFCQSETPGAGKAVKVSEPMKKSRRGPRSRSSQYRGVTFYRRTGRWESHIWDCGKQVYLGGFDTAHAAARAYDRAAIKFRGVEADINFNIEDYEEDLKQMTNLTKEEFVHVLRRQSTGFPRGSSKYRGVTLHKCGRWEARMGQFLGKKYVYLGLFDTEIEAARAYDKAAIKCNGKEAVTNFDPSIYDSELNSESSGGVAADHNLDLSLGNSSSKHNNSQTSGNHFANSATDQHMPPESNWRNGGSKPKLVNILPKPCGRSNIEAYGHGESETLRLLSQTHLQSPTNKEMHRYGPYRSPAEPQKPHNFAHHLHQPSFHVPSSSSNGGRIGSDLSLSMSDQQQWQAGPPHLLATAAASSGFPQQIRPSQGWLQKNGFHSLMRPS

SEQ ID NO: 30162 - protein, 593 aa, Glycine max
  Clone ID: TF_GmC25_1.pep
MRKICCLYWLCIWSDRCRPEELRILRENTNYWKVKKINSTEQRIGGFCPLTPKEVGIFLHALGYPPSTPIYIAAGVIYGGNTHLSELSSRFPSIIFKESLATPEKLTDGAIVMDADATSALHKRGIVPTNDSFKYAWFKDHESVVKAIYTGSEFVDTVNTGDDIGVVLESTSFYAEQGGQIFDTGSLEGPHALFEVRNVQVYGGFVLHIGNGTGVSVGDKVVCKVDYGRRALIAPNHTCTHMLNFALREVLGDHVDQKGSIVLAEKLRFDFSHGKPIEADNLRRIESIVNEQIKAELDVSAKEATLAEAKGINGLRAVFGEVYPDPVRVVSIGQKVEDLLADPKNEKWLSISSELCGGTHISNTREAKAFALLSEEGIAKGIRRITAVTTDRAYDAMKVADEFEQQVDDAAKLVGTLLEEKVSSLKSNIETLSIPAAKKADIKIKIVRLQDQVRKAQKQVAEENKRKAVMITAEKAELAVSNGKTFCISLVDVGLDVAAVREAVTKVMDQKGLSVMVFSTDESTNKAVVCAGVPEKGGKGNLDVADWLSNALGPLKGRCGKGKGGLATGQGTEASHVNEAIDLAEKFASMKLS

SEQ ID NO: 30163 - protein, 384 aa, Glycine max
  Clone ID: TF_GmC326_5.pep
MDAISCLDESTTTESLSISQAKPSSTIMSSEKASPSPPPPNRLCRVGSGASAVVDSDGGGGGGSTEVESRKLPSSKYKGVVPQPNGRWGSQIYEKHQRVWLGTFNEEDEAARAYDVAVQRFRGKDAVTNFKPLSGTDDDDGESEFLNSHSKSEIVDMLRKHTYNDELEQSKRSRGFVRRRGSAAGAGNGNSISGACVMKAREQLFQKAVTPSDVGKLNRLVIPKQHAEKHFPLQSAANGVSATATAAKGVLLNFEDVGGKVWRFRYSYWNSSQSYVLTKGWSRFVKEKNLKAGDTVCFQRSTGPDRQLYIDWKTRNVVNEVALFGPVVEPIQMVRLFGVNILKLPGSDSIANNNNASGCCNGKRREMELFSLECSKKPKIIGAL

SEQ ID NO: 30164 - protein, 339 aa, Glycine max
  Clone ID: TF_GmC194331_1.pep
LGPTNQWRVRLPQPQETKPTATTTTETTPSETSNSNTNNKISSRKCKGTRPPDNNKFRYRGVRQRSWGKWVAEIREPRKRTRKWLGTFATAEDAARAYDRAAIILYGSRAQLNLQPSGSSSQSSSSRSSSSSTQTLRPLLPRPSGFSVNFPFNTATVPYPYNNSHNYTYSPPVLCPNDNHNNNIVQVHHPHHHRCPEELVQVQVAHTLSTSYQHNSESDVGLGVNNNVFVVDGSIRSTSYQRHGFLDSNNNHVHVQVQHGVLLNQQQQQHQNGVVVEGVNNSPVVGSVASAMDAFSVDPDLALVGTMGLGSFSPFWSMANEDDYTGSLWDYNDPFFFDL

SEQ ID NO: 30165 - protein, 202 aa, Glycine max
  Clone ID: TF_GmC194331_2.pep
TRPVVSAKVKGGPDNNKFRYRGVRQRSWGKWVAEIREPRKRTRKWLGTFATAEDAARAYDRAAIILYGSRAQLNLQPSGSSSQSSSSRSSSSSTQTLRPLLPRPSGFTFNFPFNSAPATTVPYPYNNSHNYTYTPPVLYPIDNSKNHNINTVQVHHPHHYPRVREVVQVPHSESDLGGLGGNNNIVVDGSIRSTSYQRHGFG

SEQ ID NO: 30166 - protein, 119 aa, Glycine max
  Clone ID: TF_17023892.pep
NVWTCVCVCEGNVRRHYRGVRQRPWGKWASEIRDPKKAARVWLGTFETAEAAALAYDEAALRFKGTKAKLNFPERVHFSKEFGYLTNRPSLFHASATPLSDQHSQVFGGTATNNDAMPR

SEQ ID NO: 30167 - protein, 230 aa, Glycine max
  Clone ID: TF_GmC104_1.pep
MSSSSFSPATLTTEQELSVIVAALTNVVAGSTSASSSFSLPEFRLPQTSDPLAAACLMPPPPPPSMDTCRECNIAGCLGCNFFPEEKKKQKRAKKKYRGVRQRPWGKWAAEIRDPRRAARVWLGTFGTAEDAARAYDKAAIEFRGPRAKLNFPLVDESLTLQQSEPERVQTEEEQIKTENLNQGMEMDSFGNKDTEFWDRINEADFHQLMMMMDFAGDSSDSATGNALSS

SEQ ID NO: 30168 - protein, 136 aa, Glycine max
  Clone ID: TF_LIB4391-059-R1-K1-C1.pep
PQSKKRVLTHTPSTRRSTCGKYRGVRQRKWGKWAAEIRDPFQCTRIWLGTFNTAEEASKAYETRRLEFEAMAKTQTLKTGSEPLSTTSDKSNCCNSSAAAAADVSVSEKFSTTSDDSEESMLSHNSPSSVLELDTS

SEQ ID NO: 30169 - protein, 285 aa, Glycine max
  Clone ID: TF_GmC91_1.pep
MENNNHHAMAAGASSDSNTSDHTTPISSSCVNDNNNNKLYKGVRKRKWGKWVSEIRLPNSRERIWLGSYDSPEKAARAFDAALYCLRGRHANFNFPNTPCNMDTATNAPPNQSLTPPEIQEVAAKFANQVSPLLQKPQEQPQPQRSSDGGGGGANSSSFGSKLLCKSDSIAESSTTSTTTNCTPTTTASSCSATMYECDGTEQVDRGDMMDWTFLNVFDFSNEVVLPAVGSDYNDLYNSELHKMHSDSGELLYSTPFEGYEQLIEADHDDDDPFSHQSFLWNWNF

SEQ ID NO: 30170 - protein, 313 aa, Glycine max
  Clone ID: TF_GmC1423_2.pep
GRQVYLGGYDMEEKAARAYDMAALKYWGPSSHINFPLENYQNELEEMKNMTRQEYVAHLRRKSSGFSRGASMYRGVTRSHRLAFTQHHQHGRWQARIGRVAGNKDLYLGTFSTQEEAAEAYDIAAIKFRGFNAVTNFDITRYDVERIMESNNLLSSEQAKRKREMDDGTRSEATVNQKPCTTQETVLMQKRCRSQSEWKMVQYPSSQQLDQNPQRIECSRTESLSTALDNMFHHQVEESSNMGTHLSNPSSLVTSLSSSREESPDKTSLPMLFGMPSTVSKLLADVDSLDLSSNLRPSLSIPQMPIFAAWTDA

SEQ ID NO: 30171 - protein, 317 aa, Glycine max
  Clone ID: TF_GmC1349_1.pep
MEGMRDTKSQLEIQDQEGTNIGSSLSKLILASGSGTNTLDSIFSNCPQTTNGSTSSNSVLDDLEPFKSSGCEPLGSSVYLRQRDILQKFYQESRGNGSYNVPTSSLSNSLTNPCKKKLYRGVRQRHWGKWVAEIRLPQNRMRVWLGTYDTAEAAAYAYDRAAYKLRGEYARLNFPNLKDPTKLGFGDSARLNALKSSVDAKIQAICQKVKRERAKKNAAKKLHNSTDPKRGQSEKPSSSSSPSPSPSPSSIFNDNWANQLFSPAVSEDGFWKGENSHSPASVLTECQTEETELLFEGCSLARLPSFDPELIWEVLTV

SEQ ID NO: 30172 - protein, 304 aa, Glycine max
  Clone ID: TF_GmC1488_1.pep
MLKSGMGIQERKKVKKPAQASSRKGCMRGKGGPENATCTYKGVRQRTWGKWVAEIREPNRGARLWLGTFDTAREAALAYDAAARKLYGPDAKLNLPELSVPYAAGVMNPSHMQQQQQQQQQPQVPQMMMQQQQPLVHPTFDLVNVTPHSDFNNNSINILNNNPVVSSMASSFLADAAAPVYTSCDSIVSLPLSATNYTTNNTVPMEMDGYYYSSIAVESKEDDMFRPFWGPTMDDTMPVSDESIWTEAAMSLDYPIVGGGGGFVTTENLFGEATAWTPCKLLLSACKLSSDERDRQYSNKVLCL

SEQ ID NO: 30173 - protein, 232 aa, Glycine max
  Clone ID: TF_GmC1216_1.pep
MVMEESNPLDNEVQPTTSSSSFTITTPSTSSSSSIEEATNTTTKEKKKKRAISNIEGKHPTYRGVRMRQWGKWVSEIREPRKKSRIWLGTFPTPDMAARAHDVAALTIKGSSAYLNFPELAAKLPRPASTSPKDIQAAAAKASALDFGHQSHEAESELSQAVSSSIQTQSSSSSSNSSLKGVDDTFLDLPDLSLDLSHGADEFHYSSAWLVAGAEHIELGFRLEEPFLWESY

SEQ ID NO: 30174 - protein, 222 aa, Glycine max
  Clone ID: TF_GmC464_2.pep
MRKGRGGGASAAAAAAVNGSVLKEPRYRGVRKRPWGRFAAEIRDPLKKARVWLGTFDSAEDAARAYDTAARNLRGSKAKTNFPLSPFCYQHPTTDPFFYAGFHDHQNNSNNNNDNLNNPQRPTSSGMSSTVESFSGPRPPTTTTTTTTPFLTTTRRYPRTPPLVPEDCHSDCDSSSSVVDDSDDNIVSSSFRPPLPFDLNALPFDDDAAVVDDDLRCTALCL

SEQ ID NO: 30175 - protein, 382 aa, Glycine max
  Clone ID: TF_GmC826_11.pep
MCGGAIISDFIPAGPASGARRVTADILWPSLRKRFSKPLLDDDFEAGFREFKDDSEIEDVDDEDDEDEEELKKKPFGFSRSSNKAASKPLSRGSATVESKGQAEKCAKRKRKNQYRGIRQRPWGKWAAEIRDPRKGVRVWLGTFSTAEEAARAYDAEARRIRGKKAKVNFPDEPSGAAASSKRLKVNPEAQPMKENLNTVKPKMNQMFNFGHNLEGYYSPIDQVEQKPLVNQYVNPAPFPGNGVQVSPVTPSADVTAYFSSEHSSNSFDYSDLGWGEQVPKTPEISSLLSAAPLEGAADQVQKTNNSQDVVAAQDDSAKTLSEELADIESQLKFFETPSFLDEAWADATLASLLGGDATHDAAGNPMNLWSFDDLPSMAGVF

SEQ ID NO: 30176 - protein, 392 aa, Glycine max
  Clone ID: TF_GmC826_12.pep
MCGGAIISDFIPAGPAGGAQRVTADILWPNLRKRFSKSLLDDDFEAGFREFEDDSEIEDVDDEDDEEEEELKKKKPFGFSRSNNKAASKPLSRGATTVKSVESKGQAEKCAKRKRKNQYRGIRQRPWGKWAAEIRDPRKGVRVWLGTFSTAEEAARAYDAEARRIRGKKAKVNFPDEPSGAASSKRLKANPEAQPMKKNLNSVKPKINQMFNFGDNLEGYYSPIDQVEQKPLVNQYVNRAPFAGNGVQVSPVTPSADVTAYFSSEHSSSSFDYSDLGWGEQVPKTPEISSMLSAAPLDGESQFVQGAADQNQKKNNLLDMASVQDDSAKTLSEELADIESQLKFFETPSFLDEAWADAALASLLSEDASQDAAGNPMNLWSFDDLPSMAGVF

SEQ ID NO: 30177 - protein, 194 aa, Glycine max
  Clone ID: TF_GmC847_1.pep
MCGGAIIADFIPRQRPRTLTASELWPKRSEPQPQPPPPPVKRQRKNLYRGIRQRPWGKWAAEIRDPRKGVRVWLGTFNTAEEAARAYDKEARKIRGKKAKVNFPNEDDPLPQYGSCKSLNLEFGYDLNQTGLFPSSNADENCGSHVAYSVTEANNKVEKLSEELMAYENLMRFYQIPENVVGDLWAFPDTSPPL

SEQ ID NO: 30178 - protein, 218 aa, Glycine max
  unsure (1)..(218): unsure at all Xaa locations
  Clone ID: TF_GmC847_2.pep
MCGGAIIADFIPRQRPRTLTASELWPKRSEPQPQPPPPPGESISSSLSTXNFPTNKTSSRDVTVKRQRKNLYRGIRQRPWGKWAAEIRDPRKGVRVWLGTFNTAEEAARAYDKEARKIRGKKAKVNFPNEDDPLPQYGSCKSLNLEFGYDLNQTGLFPSSNADENCGSHVAYSVTEANNKVEKLSEELMAYENLMRFYQIPENVVGDLWAFPDTSPPL

SEQ ID NO: 30179 - protein, 164 aa, Glycine max
  Clone ID: TF_GmC982_1.pep
MCSISEKAKRKRQSAFRGVRKRSWGRYVSEIRLPGQKTRIWLGSFGSPEMAARAYDSAAFFLKGTSATLNFPDLVHSLPRPLSSSRRDIQSAAAEAALHSPPPKEEQESIFTSTTTSSFHDVMEAPLMSPLRVDSTFGDFSWDQLFDFNDDILIVGSTSATLVP

SEQ ID NO: 30180 - protein, 174 aa, Glycine max
  Clone ID: TF_GmC3803_1.pep
MEDRDHCCSNNSTMITTTKKRTGRRSPTSDKLKNQHREKQSMKPYRGIRMRKWGKWVAEIREPNKRSRIWLGSYTTPVAAARAYDTAVFYLRGPTARLNFPELLFQDDDQEGSDSVQHGAAGNMSADSIRRKATQVGARVDALQTALHHHAPSTNSLNLKPDLNEFPKLEELQD

SEQ ID NO: 30181 - protein, 128 aa, Glycine max
  Clone ID: TF_GmC2485_5.pep
MHMLVKNHNKGDGSKSLADTLAKWKEYNAWLESNNEAEKPARKVPAKGSKKGCMKGKGGPENSRCNYRGVRQRTWGKWVAEIREPNRGSRLWLGTFPTAISAALAYDEAARAMYGSCARLNFPHVQVS

SEQ ID NO: 30182 - protein, 222 aa, Glycine max
  Clone ID: TF_GmC464_1.pep
MRKGRGGGASAAAVDVNGSILKEPRYRGVRKRPWGRFAAEIRDPLKKARVWLGTFNSAEDAARAYDAAARTLRGPKAKTNFPPLSPFCYPHPTTDPFFYTGFHDQHHHHNNNNLNNPQRPTSSGMSSTVESFSGPRPPTTTTTTTTTTATPFLTATRRYPRTPPLVPEDCHSDCDSSSSVVDDGDDNIVSSSFRPPLPFDLNALPFDDAAADDDLRRTALCL

SEQ ID NO: 30183 - protein, 193 aa, Glycine max
  Clone ID: TF_GmC1324_1.pep
MAPRDSRATAFAGPGPGPSPAHKEIRYRGVRKRPWGRYAAEIRDPGKKTRVWLGTFDTAEEAARAYDTAAREFRGAKAKTNFPTPSELILNNNIRSPSQSSTLDSSSPPSPPPPLDLTLTPLSVAVTVFPVARPVLFFDAFARADAMIAVSRREMCGFERPAADFRRNDSDSDYNRRVLLDLDLNVPPLPEVA

SEQ ID NO: 30184 - protein, 193 aa, Glycine max
  Clone ID: TF_GmC1324_2.pep
MAPRDSRATALIGPGPSLSPAHKEIRYRGVRKRPWGRYAAEIRDPGKKTRVWLGTFDTAEEAARAYDTAAREFRGAKAKTNFPTPSELILNNNNINARSPSQTSTLDSSSPPPPPPLDLTLTPLSSAVFPVARPVLFFDAFARADTMVAVSRRETCGFERPAADFRRGDSDSDYNRRILLDLDLNVPPLPEVA

SEQ ID NO: 30185 - protein, 133 aa, Glycine max
  Clone ID: TF_uC-gmroLIB3259P226c09a1.pep
MAPRDSRATAFAGPGPSPAHKEIRYRGVRKRPWGRYAAEIRDPGKKTRVWLGTFDTAEEAARAYDTAAREFRGAKAKTNFPTPSELILNNNIRSPSQSSTLDSSSPPSPPPPLDLTLTLSVAAVFPGLVRFYF

SEQ ID NO: 30186 - protein, 277 aa, Glycine max
  unsure (1)..(277): unsure at all Xaa locations
  Clone ID: TF_GmC1702_1.pep
MANALEVSALNRIKLHLLGELSPLTQFQEPNTTSLCSQSSTSDSFTTVDQIFSEFLDFPTTTTSSTEQNQFSAFEFEPKPEIIEPQLEFSFPTTRCKSSRRPSLQISLPKKTEWIQFGEPEVTETVSQSNPNAEEKKHYRGVRQRPWGKFAAXEIRDPNKRGSRVWLGTFDTAIEAAKAYDRAAFRLRGSKAILNFPLEAGADDRKRQREEKVEPVLEVVKREKIGESDVSLIKNNPLTPSSWLGFWGSDANGIFTVPPLSPLSPHPALGFPQLMVV

SEQ ID NO: 30187 - protein, 134 aa, Glycine max
  Clone ID: TF_7591397.pep
QFQHPKKHLRASTSKGGTGRYNNNTTTSKYVGVRQRASGKWVAEIKDTTQKIRMWLGTYETAEEAARAYDEAACLLRGSNTRTNFITRVSLDSPLASRIQNLVNNRKGTKTKQEQYVVETCDTRIKSNRHESIA

SEQ ID NO: 30188 - protein, 226 aa, Glycine max
  Clone ID: TF_GmC751_1.pep
MTQQATTSSETTTSSSSSSSSSSSTFSPSQHSGPKAQAQKQSKRPRDCSKHPVYHGVRKRNWGKWVSEIREPRKKSRIWLGTFATPEMAARAHDVAALTIKGESAILNFPEIADLLPRPVTCSPRDIQTAATAAASMVKFDPVTQSSDSETPESSELSEIVELPNIEDSSVDSTPEFVLVDVVDSWVFPPMGMGSEGIEFCAAFSDELFPQQSFIGSEIEILPIWD

SEQ ID NO: 30189 - protein, 228 aa, Glycine max
  Clone ID: TF_GmC751_2.pep
MTQQATTSSETTTSSSSSSSSSSSTFSPSQHSGPKAQAQKQSKRPRDCSKHPVYHGVRKRNWGKWVSEIREPRKKSRIWLGTFATPEMAARAHDVAALTIKGESAILNFPEIADLLPRPVTCAPRDIQAAATAAASMVKFDPVTQSSDSETPESSELSEIVELPNIEDSSFDSVDSRPEFVLVDVVDGWVFPPMGMGSEGIEICAAFSDELFPQQSFVDEIEILPIWD

SEQ ID NO: 30190 - protein, 215 aa, Glycine max
  Clone ID: TF_GmC289_3.pep
MRRGRTAAAAAAVVDPTPDQAKETTRFRGVRKRPWGRFAAEIRDPWKKQRVWLGTFDSAEDAARAYDKAARSFRGPKAKTNFPPFPGPAEADHHSQIPLYQAHGLSTKFEPVVQVNRPTSSGMSSTVESFSGPRVPSSSSRAKPLVVVVNPIIPLNDDEDDCHSDCDSSSSVVDDGQDCVLISSFRQPLPFDLNLPPSDADDDNDDDLPATALCL

SEQ ID NO: 30191 - protein, 510 aa, Glycine max
  Clone ID: TF_GmC88_1.pep
MARASTNWLSFSLSPMEMLRTPEPQFVQYDAASDTSSHHYYLDNLYTNGWGNGSLKFEQNLNHSDVSFVESSSQSVSHAPPKLEDFLGDSSAVMRYSDSQTETQDSSLTHIYDHHHHHHHHHHHGSSAYFGGDHQDLKAITGFQAFSTNSGSEVDDSASIGKAQASEFGTHSIESSGNEFAAFSGGTTGTLSLAVALSSEKAVVAAESNSSKKIVDTFGQRTSIYRGVTRHRWTGRYEAHLWDNSCRREGQARKGRQVYLGGYDKEEKAARAYDLAALKYWGPTATTNFPVSNYSKEVEEMKHVTKQEFIASLRRKSSGFSRGASIYRGVTRHHQQGRWQARIGRVAGNKDLYLGTFATEEEAAEAYDIAAIKFRGANAVTNFEMNRYDVEAIMKSSLPVGGAAKRLRLSLESEQKAPPVNSSSQQQNPQCGNVSGSINFSAIHQPIASIPCGIPFDSTTAYYPHNLFQHFHPTNAGAAASAVTSANATALTALPASAATEFFIWPHQSY

SEQ ID NO: 30192 - protein, 106 aa, Glycine max
  Clone ID: TF_LIB3106-046-Q1-K1-E9.pep
MKTCLVVIQLQRLLTINKINVNLTLNITEVITLIPVTKTKPWGRFAAEIRDPWKKQRVWLGTFDSAEDAARAYDKASRRLTLPKAKTNFPPFPGPAEADHHSQIPF

SEQ ID NO: 30193 - protein, 151 aa, Glycine max
  unsure (1)..(151): unsure at all Xaa locations
  Clone ID: TF_6846032.pep
MLKEPNSDILFESFSSKGVDHDPFHDCLSFDMIDNSRDPQEESHHQVIEEAMKTKKKSYIGVRRRPWGRFAAEIRDTTRKGIRVWLGTFDSAEEAALAYDQAAFSMXXSXAVLNFPVKXVKESLQEMNYSGCSRRCSPALELKERHNIRRK

SEQ ID NO: 30194 - protein, 394 aa, Glycine max
  Clone ID: TF_GmC877_1.pep
MGAYDQVSLKPLDSSRKRKSRSRGYGTRSVAETIAKWKEYNEHLYSGKDDSRTTPKAPAKGSKKGCMKGKGGPQNSQCNYRGVRQRTWGKWVGEIREPNRGSRLWLGTFSSAQEAALAYDEAARAMYGPCARLNFPGITDYASFKESLKESSMAASSSCSSAETATSDTTTTTSNQSEVCAVEDVIENPRLVNVNDKVNDCHKAYVSASPTSRMKQEPKDEAVDHMDTGAGEIQDVGLEGTHDTGQVAENVNKDQMDLSWIDGFDFIDDYLKSFSADELFQVDELLGLIDNNPIDNSVLMQGLDFGQMGFPGDGNPQVDDTPSSFIYQLQNPDAKLLGSLPHMEQTPSGVDYGLDFLKTVESGDYNGGGEEPRFLNLDDDLNPDSNGMQARKDD

SEQ ID NO: 30195 - protein, 280 aa, Glycine max
  Clone ID: TF_GmC122477_1.pep
MSDTHQPFMSVQPPMKLHHPFNPQASSSNFDGDPPCKTAGKTKPPHTKLLRVILTDHDATDSDSSGDDDDPKNPPKHKKVKRQITHITINLPSFSEAPTPAPIPTPSSSSSIDPTRLTLPKKRPAVPRRRSKFRGVRQRPWGRWTAEIRDPNQRKRVWLGTFDTAEEAAAVYDDAALKLKGPNAVTNFPLSAAGKTEHDTAPPEAAFSGEGFSSPTSVLTYFDGDSTPLYGFRYGEVDAFGFDIDAPFSLTDVNLGVLSQRFGKEDFGEFDPDEFLTWPS

SEQ ID NO: 30196 - protein, 252 aa, Glycine max
  Clone ID: TF_GmC280_1.pep
EKVKGCNFFLTNLTTFCNVFSGSVWFSGSSWNSKKIPTLKMGRGGTAAAAVEIAEPGSRPVFFKEPRYRGVRKRPWGRFAAEIRDPLKKARVWLGTFDTAEEAARAYDTAARTLRGPKAKTNFPLSPPFYHPDPFSDHRYFDGAGAGEDFQDHRRPTSSGMSSTVESFSGPRAAVPAKAPVIVNRRYPRTPPVVPEDCRSDCDSSSSVVDDGDGDNVASSFRREPLPFDLNVLPLDDADVATDDLFCTVLCL

SEQ ID NO: 30197 - protein, 275 aa, Glycine max
  Clone ID: TF_GmC319_1.pep
MANAAEVSALNRIKLHLLGELSPLATPLNYFDESNPSPSESSNSQSSSVSLNHYFTDLFEFDSKPQIIDLQTPKTLTSAQKKPQLNRKPSLLIAVPKKTEWIQFGSPDPNPVMAAPENLPQKNHYRGVRQRPWGKFAAEIRDPNKRGSRVWLGTFDTAVEAAKAYDRAAFRLRGSKAILNFPLEVSAVAETVSVAAAEGNVERKRRREEEEVVVEEVKPVVKKEKITEQDVSCFRGMPLTPSMWTGFWDSDVKDIFNVPPLSPLSPFGFSPLVAV

SEQ ID NO: 30198 - protein, 275 aa, Glycine max
  Clone ID: TF_GmC286149_1.pep
MEIQFQQPNLQHQKSGIAITKGGKFKGRSRNNNTNKFAGVRQRPSGRWVAEIKDTTQKIRMWLGTFETAEEAARAYDEAACLLRGSNTRTNFITHVSLDSPLASRIRNLLNNRKGIKKEEDANANANNAPAPRVSTTSSATSTGTSSNSSNGNDNNDQSLSTVTTQSSNLFDDAYKPDLSNCREEFESGHQSNTSWCFGPVFDRFPMAQIFDIPKIDDGLTNAADLDLSEFERMKVERQISASLYAINGVQEYMETVQDSNETLWDLPPLCSLFC

SEQ ID NO: 30199 - protein, 123 aa, Glycine max
  Clone ID: TF_7590215.pep
MVQSRKFRGVRQRHWGSWVSEIRHPLLKRRVWLGTFETAEEAARAYDEAAILMSGRNAKTNFPVGENQIVGNHSSNTSSSSTTTLSAVLSAKLRKCCKSPSPSLTCLRLDTENSHIGVWQKRA

SEQ ID NO: 30200 - protein, 186 aa, Glycine max
  Clone ID: TF_LIB5119-054-A1-PF1-G2.pep
MARPQQRYRGVRQRHWGSWVSEIRHPLLKTRIWLGTFETADDAARAYDEAARLMCGPKARTNFPYNPNEPHSSSSKLLSATLTAKLHKCHMASLSLQMAKQKPPQNKEPQPSHGSNPFASANAIAGSSADTSFRWPDNRHEEFRWLEGNWVGVEGQVEVSNQQFQPVLEDDHIEQMIQELLDYGSI

SEQ ID NO: 30201 - protein, 240 aa, Glycine max
  Clone ID: TF_GmC1399_2.pep
MYGQSSYESDLALLDSIRRHLLGDSEEHKFGAPNVSSGNTPAYSRSSCFSRLYPCLSNDWGELPLKEDDSEDMLLYGVLRDAINAGWVPSLDASSPESFSSGFIPAVTVKSEPDLFPAPEPVYIPPAAQKAEPAVVPAKGKHYRGVRQRPWGKFAAEIRDPAKNGARVWLGTFETAEDAALAYDRAAYRMRGSRALLNFPLRINSGEPEPVRVTAKRASAEPCSSSESGSWVKKRKKVVG

SEQ ID NO: 30202 - protein, 199 aa, Glycine max
  Clone ID: TF_GmC31_1.pep
MATAEEISTLKLLRQYLLGDISDPFLTNLIPVKLEDPSSGLDMGSNFSEQSSFCKFLECFDFEAEVVGLTSHHKVQSSIATSPPQNFNFPEEPMVSMKKEATCYATRHYRGVRRRPWGKFAAEIRDPKKKGSRVWLGTFDTEIDAAKAYDCAAFRMRGHKAVLNFPLEAGMSHPEPNSSGRKRRREYTTAATSSRHVMS

SEQ ID NO: 30203 - protein, 100 aa, Glycine max
  unsure (1)..(100): unsure at all Xaa locations
  Clone ID: TF_6134020.pep
LRGRTDCAAAADVDPTPDQAKETTRFLGERNRPCGRFAAEIRDSRKNQRVWLGTFHSSEDAARSYYTAAHXLRVPKAGCNFLPSYGPTEARPPLSDSALP

SEQ ID NO: 30204 - protein, 296 aa, Glycine max
  Clone ID: TF_GmC56_1.pep
MVEPLNQSTPRTKKMKHKRNPIHDSKMTRKLRIICNDPDATDSSSDEDEYFGNVRKMIEPLEPLERLEVPVNPVVADETSTESTNNDELNQTKRVMAKTPSVKRQSCGKYKGVRMRKWGKWAAEIRDPFKGTRIWLGTFSTAEEASQAYETRRLEFEVMAKALSDEKSNNGSSNNNVVASAETETVAAPENNSSNYYLEMLEMPDLSMLNVPSPSAVAATAAAPSEFELDLLAFVDSEYGFHDEHDFDDDLAALEDFHICGFDDNEPSELPDYDFDDFGADEFAGWIEEPLNIPCV

SEQ ID NO: 30205 - protein, 199 aa, Glycine max
  Clone ID: TF_GmC1684_2.pep
SFCCEKTTEGYGCEKTTEGYGCEKTTEGYGCEKTTEGRTRGTENVKKEEGRRKYRGVRQRPWGKWAAEIRDPFKAARVWLGTFETVEAAARAYDEAALRFRGSKAKLNFPENVTLRQPQFTVSTSTDPFQLSGTNLYDHRMFLTSNTMASHHLQSSLPLPPATSSSLTSPPQNITSLSSLYSAQLPPWSASGHSSSSSP

SEQ ID NO: 30206 - protein, 179 aa, Glycine max
  Clone ID: TF_GmC78516_1.pep
MARPQQRYRGVRQRHWGSWVSEIRHPLLKTRIWLGTFETAEDAARAYDEAARLMCGPKARTNFPYNPNEPLSSSSKLLSATLTAKLHKCHMASLSLQMSKQKQSQTEPHQGSSSDSGNAIAGTSSDNTGFRWPEEEAQVEVPPAQQQQFQPVLQDDHIEQMIQELLDYGSMELSFVDSA

SEQ ID NO: 30207 - protein, 256 aa, Glycine max
  Clone ID: TF_GmC1816_2.pep
LLPPHPSFSTYTPSAYLLENQERIEGVEEQPSSLLGLNHLSTSQISQIQAQAQAQNSLSLNFLGPKPVPMKHVGGPAKPTKLYRGVRQRHWGKWVAEIRLPKNRTRLWLGTFDTAEEAALAYDKAAYRLRGDLARLNFPNLKGSCPGEEYKPMQAAVDAKLDAICANLAEMQKQGKNEKGARSGKKSKQGPNLEAKPEPEASGSGAAALSPESEGSADSSALSDLTFDVTEPQWEDASAHFNLQKFPSYEIDWDSL

SEQ ID NO: 30208 - protein, 206 aa, Glycine max
  Clone ID: TF_uC-gmflLIB3275P137g09b1.pep
PLGFDAWASGRWVAEIKDSSQHVRLWLGTYDTPEEAARAYDEAARALRGENARTNFAPVSQLVNGQLGQQSGFNNNNNLLSTGSDIGKHGLSFASLKAKLSKNLQNIMARASDHNNNNNNKSSKSRVSDHFTFASIFHRRSYQIPEGDMMKNIEKVVQPSIIVPPMEQSGGDYNSCVANWESASSVSDCSSEWVGFGNNNSKPRLE

SEQ ID NO: 30209 - protein, 214 aa, Glycine max
  Clone ID: TF_GmC2485_24.pep
MHMLVKNHNKGDGSKSLADTLAKWKEYNAWLESNNEAEKPARKVPAKGSKKGCMKGKGGPENSRCNYRGVRQRTWGKWVAEIREPNRGSRLWLGTFPTAISAALAYDEAARAMYGSCARLNFPNVQVSTLSEESSRNSPAAANRSRNSPAASQSGHALMILESSECMILPNNSGGDAAEDDDMEDLSLSLSVKRVKHEEGEDESGTSSSYLSLS

SEQ ID NO: 30210 - protein, 195 aa, Glycine max
  Clone ID: TF_GmC6701_1.pep
MSSHALNTNVNALDHFEIPVTTPFQDVSASVPSIAAFCRSSSFRNIFLTENWAELPLKENDTNDMVIYGALRDAAATGWFPANGNEVSNVSVAVKMENEGQNSKTTAARGTRTPPKKGLSYRGVRRRPWGKYAAEIRDTKRNGVRVWLGTYETAEDAALAYDRAAFKMRGSKAKLNFPHLIGSDHEPIKVTLKKH

SEQ ID NO: 30211 - protein, 300 aa, Glycine max
  Clone ID: TF_GmC400_1.pep
MCGGAIIADFIPRRGGRRLTASELWPNSFAKDDDFDLDYSHIATQQPSTLKRSQPPKVSEQVENKPVKRQRKNLYRGIRQRPWGKWAAEIRDPRKGVRVWLGTFNTAEEAARAYDREARKIRGKKAKVNFPNEDDEYSIQARNPIPPLPFAPQHPPLYQQQYRCDLNNAPKNLNFEFGYDLNHAEAFPSRVDAVNADSVVVSVDENSGSASGSEGAYSTTEFMGSVQNGNGYLGGTVMEKKEKETEVIEAEEEKNKVLELSEELMAYENYMKFYQIPYYDGQSTTNNVQESLVGDLWSFD

SEQ ID NO: 30212 - protein, 304 aa, Glycine max
  Clone ID: TF_GmC400_2.pep
MCGGAIIADFIPRRGGRRLTASELWPNSFGKDGDFDFDYSHIADQQRSTLKMSPPPKASEQVENKPVKRQRKNLYRGIRQRPWGKWAAEIRDPRKGVRVWLGTFNTAEEAARAYDREARKIRGKKAKVNFPNEDDEYSIQARHPIPPLPFTPQTQNPPLYQQQYRCDLNIAPKNLNFEFGYDLNHAGAFPSHVDAVNADSVVVSGDENSGLASGSEGAYSTTEFMGSSQNGNGYLGVTAMEKNEKETEVIEAQEEKNKVQELSEELMAYENYMKFYRIPYYDGQSTAPPNNVQESLVGDLWSFD

SEQ ID NO: 30213 - protein, 278 aa, Glycine max
  Clone ID: TF_GmC319_2.pep
MANAAEVSALKRIKLHLLGELSPLATPQNKFDQTNPSPSESSNSESSSISLNHYFTDLLEPEIEFPLFEFDSKPQVIDLETPKTLISAEKKPQFNRKPSLLIAVPKKTEWIQFGNPEVAAPENQPEKKHYRGVRQRPWGKFAAEIRDPNKRGSRVWLGTFDTAIEAAKAYDRAAFRLRGSKAILNFPLEVNTAAETVSVAAVDVERKRRREEEEVVVEDVKAVVKKEKITEHDVSCFRGMPLTPSMWTGFWDSDVKDIFNIPPLSPLSPFGFSPLVAV

SEQ ID NO: 30214 - protein, 211 aa, Glycine max
  unsure (1)..(211): unsure at all Xaa locations
  Clone ID: TF_GmC2485_15.pep
MHMLVKNHNKGDGSKSLADTLAKWKEYNAWLESNNEAEKPVRKVPAKGSKKGCMKGKGGPENLRCNYRGVRQRTWGKWVAEIREPNRGSRLWLGTFXTAISAALAYDEAAMAMYGFCARLNFPNVQVSTFSEEPSRNSPAAAYQSRNSPSAKESGSALVILERSECMMLWNNSGGDAAEDDGMEDLSLSLSVKHEEGEDESGTSSSYLSLS

SEQ ID NO: 30215 - protein, 255 aa, Glycine max
  Clone ID: TF_GmC1772_1.pep
MNILGQSLHQSNNGSYSCSSPETANSSNLPTTPKAVHSDEEVNTLASAHPKKRAGRRIFKETRHPVYRGVRRRNNNKWVCEVRVPNDKSTRIWLGTYPTPEMAARAHDVAALSLRGKSACLNFADSAWRLPLPASTNAKEIRRVAAAAAVAIAAEDSRGKQLRTNAIDAVADCEVSSSDIGVDENCNNNKASQRFCDLDEITMPDAPVFEDMHEWLQTMAAEPLRSPTFVTYVNVRDVWNFVEDDAEVSLWSFTV

SEQ ID NO: 30216 - protein, 205 aa, Glycine max
  Clone ID: TF_GmC268_1.pep
MAKEKKNLSNKNKKPSNADEVHFRGVRKRPWGRYAAEIRDPGKKTRVWLGTFDTAEDAARAYDVAARNFRGPKAKTNFPFLPDNNTNVNLNKKNNNVNVKSDSPSQSSTVESSTPEREFTRRAAPAAMDRFPFLPIQQQILVTHPVAPMRPVYFLDRAHFMTQPFPLRFEPGPVQSDSDSSSVVVDCQPKRELNLDLNLAPPNEY

SEQ ID NO: 30217 - protein, 195 aa, Glycine max
  Clone ID: TF_GmC28_2.pep
MSQTTATTTTIATTMYNNNQVSSSSFSSDETNNTKDDKHYRGVRRRPWGKYAAEIRDPNRKGSRVWLGTFDTAIEAAKAYDKAAFKMRGSKAILNFPLEIGSDQSKEESSSSSSSVSSSSIVIKVGVKREREEESERKNNYEKSEFNNNSNSNKHVKKEECPLTPSCWKGFWDTDVMGTIFSVPPLSPLSPLMVV

SEQ ID NO: 30218 - protein, 343 aa, Glycine max
  Clone ID: TF_GmC1839_1.pep
MLDLNLNADSASDLQMESSGSFNSSVVNAADTDDSCSYGDAVAYNFAILNNAATSDGLPLGAAGEPSVRTIQLFPAADSGASAPLLLDFSSKVDQHGAPPEQRITPRQQQVKKSRRGPRSRSSQYRGVTFYRRTGRWESHIWDCGKQVYLGGFDTAHVAARAYDRAAIKFRGVDADINFNVSDYDEDIKQMSNFTKEEFVHILRRQSTGFSRGSSKYRGVTLHKCGRWEARMGQFLGKKYIYLGLFDSELEAARAYDKAAIKCNGREAVTNFEPSLYEGDVSSSRAKLGMASPRSLWQGNSCSTLLYCSIIRIPFNNNTISCGYSNSFSKHDIPPLAFSIINH

SEQ ID NO: 30219 - protein, 177 aa, Glycine max
  Clone ID: TF_GmC4678_8.pep
MEGEGRRREGGERETATAAATRKVVEGADQRRYKGIRMRKWGKWVAEIREPNKRSRIWLGSYSTPVAAARAYDTAVFYLRGPSARLNFPELLIGEGAAALTGGCDMSAASIRKKASEVGARVDALQATLHHHHHHVVPPRQLLSASCGGGSGDFAVRVVDLNKMPEPESSDCEWNVN

SEQ ID NO: 30220 - protein, 96 aa, Glycine max
  unsure (1)..(96): unsure at all Xaa locations
  Clone ID: TF_uC-gmroLIB3259P225d12b1.pep
SYSWPTGVVPATAFICGTSGCSVLVSHGFSCAATISDLSVSQGHDAYGVSCSRSLPCGLFLVLGGVAAGKLRFSPLQCQKLRLRLYKKYVIXDAWV

SEQ ID NO: 30221 - protein, 97 aa, Glycine max
  Clone ID: TF_GmC6107_7.pep
DVRNYRVPLCVLNGHGYAVRKVKFSPHVRNLMVSCSYDMTVCVWDFMVEDALVSRYDHHTEFAVGVDMSVLVEGLMASTGWDELVYVWQHGTDPRAP

SEQ ID NO: 30222 - protein, 232 aa, Glycine max
  Clone ID: TF_GmC700_2.pep
GSSSSRIGSRAELPSSEASSSASTRKHSHSVYRGVRMRAWGKWVSEIREPRKKNRIWLGTFATAEMAARAHDVAALAIKGNSAILNFPELASSLPRPDSNSPRDVQAAAAKAAAMEVNDAPTTPTSSSSASLSQSSSWSSLAVSSSSGEDPSTPEELGEIVELPSLGTSFEIPDPSGELVFFDPWPYSQAWSHGIYDESESYFFGDQISMQDSETESMVLCGFAFEASLWQH

SEQ ID NO: 30223 - protein, 260 aa, Glycine max
  Clone ID: TF_GmC130895_1.pep
MHPINTGDDSTLSSPIPQYGQISNSCLIETQDPSLQPLNQGGNGRKRHYRGVRQRPWGKWAAEIRDPKKAARVWLGTFDTAEAAAAAYDAAALKFKGSKAKLNFPEHVLLPPPPISSSSPPCNNNNNHHSYYYGSSALAPLAPPPQHVYDQTPPPQQQPLLSSSAQEEGFPNLMQYAQLLWSRDDDDLQRIASGLHQHHHHNEAFYDSSSSTLFSSTSTTYSMTVSDQQQNIGDDTSTPMGAEYNYGGCFFRGSDFHDKN

SEQ ID NO: 30224 - protein, 123 aa, Glycine max
  unsure (1)..(123): unsure at all Xaa locations
  Clone ID: TF_13252405.pep
EPRGRSFFFSFHPINGASDSTPSTPPSGISNSCLIETQDPSQQPLIQGIGRKRHFIGVRQRPWXLWAAEFRDPKKAAXVWLGSFDTAXAAAAASXAAAXKFIGSXANLNFPEHVLVPPPPFPS

SEQ ID NO: 30225 - protein, 169 aa, Glycine max
  Clone ID: TF_GmC1684_4.pep
SVRPRVRPRVRPRVRREDDRRGGKWAAEIRDPFKAARVWLGTFDTAEAAARAYDEAALRFRGNKAKLNFPENVTLRQPQFTVSNPPSSLVSITTSIDPVVHSTRPLLLPSQASTATNVYEYFQLSGFPTNTNLYDGNRMFVTSNAMASHHLQSSSSLLASSSSAFGSSV

SEQ ID NO: 30226 - protein, 192 aa, Glycine max
  unsure (1)..(192): unsure at all Xaa locations
  Clone ID: TF_GmC152_1.pep
MCGGAIISDFIGVKRGRNLAAQELWSELDPFSDFLGFDTTNSKNQPPLQKIPDKKVVSSCEKKKKSVVGAEKKKSDSGRARKNVYRGIRQRPWGKWAAEIRDPHKGVRVWLGTFPTAEEAAQAYDDAAIRIRGDKAKLNFPATXFPPPPLRHLPKSNAASALTPSLNKAAAAAHNPPLDPPANAAGGKTNST

SEQ ID NO: 30227 - protein, 192 aa, Glycine max
  unsure (1)..(192): unsure at all Xaa locations
  Clone ID: TF_GmC152_3.pep
MCGGAIISDFIGVKRGRNLAAQELWSELDPFSDFLGFDTTNSKNQPPLQKIPDKKVVSSCEKKKKSVVGAEKKKSDSGRARKNVYRGIRQRPWGKWAAEIRDPHKGVRVWLGTFPTAEEAAQAYDDAAIRIRGDKAKLNFPATXFPPPPLRHLPKSNAASALTSSLKKAAAAAHIPPLDPPAKAAEETTNST

SEQ ID NO: 30228 - protein, 237 aa, Glycine max
  Clone ID: TF_GmC28_1.pep
MQSSISQSEICITDYLLPQEVPSQFQFPDMSNNNIPMNHTNLQMPQITSFSKPPRSSSNLSNRKPSLRNITIPSITSDETNNIKENKHYRGVRRRPWGKYAAEIRDPNRKGSRVWLGTFDTAIEAAKAYDKAAFKMRGSKAILNFPLEIGESEESVSSCIKVGVKREREEESKSNNYEKSEFNNNNNSNKHVKKEECSPKAVCPLTPSCWKGFWDTDVMGTIFSVPPLSPLSPLMVV

SEQ ID NO: 30229 - protein, 370 aa, Glycine max
  Clone ID: TF_GmC1051_1.pep
MAKKSQLRTQKNNVTTNDDNNLNVTNTVTTKVKRTRRSVPRDSPPQRSSIYRGVTRHRWTGRYEAHLWDKHCWNESQNKKGRQVYLGAYDNEEAAAHAYDLAALKYWGQDTILNFPLSNYLNELKEMEGQSREEYIGSLRRKSSGFSRGISKYRGVARHHHNGRWEARIGKVFGNKYLYLGTYATQEEAATAYDLAAIEYRGLNAVTNFDLSRYIKWLKPNNNTNNVIDDQISINLTNINNNNNCTNSFTPSPDQEQEASFFHNKDSLNNTIVEEVTLVPHQPRPASATSALELLLQSSKFKEMMEMTSVANLSSTQMESELPQCTFPDHIQTYFEYEDSNRYEEGDDLMFKFNEFSSIVPFYQCDEFES

SEQ ID NO: 30230 - protein, 242 aa, Glycine max
  Clone ID: TF_GmC320890_1.pep
MDLDFDSTFFLNQNLSFFPENSSIFGDTFSWDYNFVLDDIFNNLSDNSSQSQTKETSSASNVSSCIGSVELQEVSSNTTYKEVKKVRPPPPSPPLPSQQVAKEPRMYRGVRKRPWGKFAAEIRDSTRNGVRVWIGTFDTAEAAALAYDQAAFSTRGSLAVLNFPEEVVRESLKDMPSKPWEEGSSPVLALKRKHTMRTKSNSKKKTKVDQREQLDFSRTSQNVLVFKNLGAEYLKQLLTLTS

SEQ ID NO: 30231 - protein, 49 aa, Glycine max
  unsure (1)..(49): unsure at all Xaa locations
  Clone ID: TF_701207375H1.pep
AKTKKNNQYRGIRQHAWGKWAAEIRDPRXGVRVWTGTFSTAEEAARCCD

SEQ ID NO: 30232 - protein, 557 aa, Glycine max
  unsure (1)..(557): unsure at all Xaa locations
  Clone ID: TF_GmC1595_1.pep
IRLEAVSKEPNSTSKPHNNLSLTFIKNTHHXSCSSPPNNNSLAFSLSNHFPNPSSSPLSLFHSFTYPSLSLTGSHTADAPPEPIAGGGATNLSIFTGAPKFEDFLGGSSATATATTCAPPQLPQFSTDNNNHLYDSELKTTIAACFPRAFAAEPTTEPQKPSPKKTVDTFGQRTSIYRGVTRHRWTGRYEAHLWDNSCRREGQSRKGRQVYLGGYDKEDKAARAYDLAALKYWGPTTTTNFPISNYEKELEEMKNMTRQEFVASLRRKSSGFSRGASIYRGVTRHHQHGRWQARIGRVAGNKDLYLGTFSTQEEAAEAYDIAAIKFRGLNAVTNFDMSRYDVKSIANSTLPIGGLSGKNKNSTDSASESKSHEASRSDERDPSAASSVTFASQQQPSSSTLSFAIPIKQDPSDYWSILGYHNSPLDNTGIRNTTSVTATSFPSSNNGTTSSLTPFHMEFSNAPTSTGSDNDAAFFSGGGIFVQQQSGHGNGHGSGSSGSSSSSLSCSIPFATPIFSLNSNTSYENSAGYGNWIGPTLHTFQSHAKPSLFQTPIFGME

SEQ ID NO: 30233 - protein, 144 aa, Glycine max
  Clone ID: TF_GmC135444_1.pep
MKTNNNVSGERKSRKRRNGGSDYVEDTLEKWKEYNRQQQLGSRENGVEVIHKAPAKGSRKGCMRGKGGPQNSDCKFRGVRQRIWGKWVAEIREPINGKLVGEKANRLWLGTFSTALEAALAYDEAAKALYGPCARFEFFRVNRL

SEQ ID NO: 30234 - protein, 211 aa, Glycine max
  Clone ID: TF_GmC289_2.pep
MRRGRATAAVVDPTAEQAKETRFRGVRKRPWGRFAAEIRDPWKKQRVWLGTFDSAEDAARAYDKAARSFRGPKAKTNFPSFPGPTDHHSSQQIPPLYQAHGLSTKFEPAQVNRPTTSGMSSTVESFSGPRVPPSSSSSRKPLVVVNPIIPLDDDDDDCHSDCDSSSSVVDDQDCVLTSSFRQPLPFDLNLPPPDAAYDDDDDDVPATALCL

SEQ ID NO: 30235 - protein, 254 aa, Glycine max
  Clone ID: TF_GmC1733_1.pep
MVKPAMASVDSSSFSSCKNDSFSSNYSIDTCKMYKGVRKRKWGKWVSEIRLPNSRERIWLGSYDTQVKAARAFDVALYCLRGKSASFNFPDTPRHLEINMVLPCDIQQQPLSHPEIQEIASKFANNDHVPLEEESAFQEQEQDPSMESQSDESKSANTITEMSNFPNIYDGGTHTNVQVDQLQGDWDSMDWTFFNMLDDLNGSDFGLYLGPDKLHPGEFLCPTQAPMLFHEDEIEGDDDHDAFSNHSLLWSWNF

SEQ ID NO: 30236 - protein, 252 aa, Glycine max
  Clone ID: TF_GmC1447_1.pep
WGTTTTTNFPISHYEKELEEMKHMTRQEYVASLRRKSSGFSRGASIYRGVTRHHQHGRWQARIGRVAGNKDLYLGTFSTQEEAAEAYDVAAIKFRGLSAVTNFDMSRYDVKSILESTTLPIGGAAKRLKDMEQVELSVDNGHRADQVDHSIIMSSHLTQGINNNYAGGGTATHHNWHNAHAFHQPQPCTTMHYPYGQRINWCKQEQQDNSDAPHSLSYSDIHQLQLGNNGTHNFFHTNSGLHPNVEHGFCFH

SEQ ID NO: 30237 - protein, 185 aa, Glycine max
  Clone ID: TF_GmC6851_1.pep
MVQTKKFRGVRQRQWGSWVSEIRHPLLKRRVWLGTFETAEAAARAYDQAAILMNGQNAKTNFPTSKNQAEADDNNNTDTFLSPKALSELLSTKLRKYCKDPAPSLTCLRLDADNSHIGVWQKGAGPHSGSNWVMRLELGKKQITEEGSESTESPQSSTNGATENNEVEEEDRVALQMIEELLNWN

SEQ ID NO: 30238 - protein, 199 aa, Glycine max
  Clone ID: TF_GmC320_1.pep
MMVKPSSEKPEEHRDSKYYKGVRKRKWGKWVSEIRLPNSRQRIWLGSFDTPEKAARAFDAAMFCLRGRNAKFNFPDNPPDIAGGESMTPSQIQVAAAQFANAGPHEGHSGRPEHSPMQSLSPSVSEGTVLTDSDVTTLNGSLTDLFTPVGSSGYASDYGIFPGVDDFSGGFYVPEMLNFNYGEENGEGFIVDESFLWNF

SEQ ID NO: 30239 - protein, 195 aa, Glycine max
  Clone ID: TF_GmC288383_1.pep
MARPQQRYRGVRQRHWGSWVSEICHPLLKTRIWLGTFETAEDAARAYDEAARLMCGSKARTNFPYNPNEPHSSSSKLLSATLTAKLHKCHMASLSLQMAKQKPPQSKEPQPSHGSSNPFAFANVIAGSSADTGFRWPDNRHEEFRWLEGNWVGVEGQVEVSHQQFQPVLEDDHIEQMIQELLDYGSIELCSVGLT

SEQ ID NO: 30240 - protein, 193 aa, Glycine max
  Clone ID: TF_700943089_FLI.pep
SKRIRGDKAKLNFPATAPPPSKKVVSSCEKKKKKSVSAEKKSGGRARKNVYRGIRQRPWGKWAAEIRDPHKGVRVWLGTFPTAEEAARAYDDAAKRIRGDKAKLNFPATAPPPSKKQRCLSPDTTTEQSSSSQSTTGSTGSPPSAAFHGGGDELDLKQLERFLGLDNMGAEWDNMDDLWMLDDVVVPNRHLIY

SEQ ID NO: 30241 - protein, 223 aa, Glycine max
  Clone ID: TF_GmC152_2.pep
MCGGAIISDFIGVKRGRNLAAQELWSELDPFSDLLGFDTTTTTTNQPPLPDKKVVSSCEKKKKKSVSAEKKSGGRARKNVYRGIRQRPWGKWAAEIRDPHKGVRVWLGTFPTAEEAARAYDDAAKRIRGDKAKLNFPATAPPPSKKQRCLSPDTTTEQSSSSQSTTGSTGSPPSAAFHGGGDELDLKQLERFLGLDNMGAEWDNMDDLWMLDDVVVPNRHLIY

SEQ ID NO: 30242 - protein, 183 aa, Glycine max
  Clone ID: TF_GmC5876_1.pep
MGSNKTYEEEESTVLFSHSQTQTELLPFNENDPQDMVIYQVLNEANALTNTFLPQRLHQPQLCLEPTRNITKKHYRGVRRRPWGKYAAEIRDSARHGARIWLGTFQTAEEAAMAYDRAAFKMRGSKALLNFPAEIVAATELSFNNTNSNNHDAVSDSSAGSSCTNNSVQLNRNQSESCTSSTG

SEQ ID NO: 30243 - protein, 157 aa, Glycine max
  Clone ID: TF_GmC5876_2.pep
MGSKKTYEEEESTALFSHSQTQTDLLLPFNENDPQDMVIYQVLHEANALTNTFLPQPTRNITKKHYRGVRRRPWGKYAAEIRDSARHGARIWLGTFQTAEEAAMAYDRAAFKMRGSKALLNFPAEIVAAATATELSFKSSSNNNNNNNNNNPDAVSD

SEQ ID NO: 30244 - protein, 323 aa, Glycine max
  Clone ID: TF_GmC1763_1.pep
MTTFMDMYNTTSSIMTPDFLDQCSDQELMKALEPFMKSDSSSTTSSSITTYPSFSSFSSSPNLSSTTWSTQFCSSSYHQKGPTPTQASSFKLNQLTPSQIFQIQAQIQVPRGQFLSPKPIPMKHVRASPSSKPTKLYRGVRQRHWGKWVAEIRLPKNRTRLWLGTFDTAEEAALAYDNAAFKLRGENARLNFPHLRHHGARAYGEFGNYKPLPSAVDAKLQAICQSLGTKLQKLKTQNPIVLDTHKAETETSEFQDFNKVENYQTSSSSALSDEYSSSSSSSSPESDITLLDFSDSCETIDNLGLDLEKYPSVEIDWAALSDS

SEQ ID NO: 30245 - protein, 98 aa, Glycine max
  unsure (1)..(98): unsure at all Xaa locations
  Clone ID: TF_LIB3056-008-Q1-N1-G5.pep
MANEKNHLDNTNMMPCNADEAHLRGVQKRPWGRYADEIRDPGKKTRVWLGTFDTDEDAXRAYDVTVRNFRGPXVKTNFPLLPDNNINVNLNMKSNNVY

SEQ ID NO: 30246 - protein, 401 aa, Glycine max
  Clone ID: TF_GmC326_1.pep
MDAISCMDESTTTESLSISLSPTSSSEKAKPSSMITSSEKVSLSPPPSNRLCRVGSGASAVVDPDGGGSGAEVESRKLPSSKYKGVVPQPNGRWGAQIYEKHQRVWLGTFNEEDEAARAYDIAAQRFRGKDAVTNFKPLAGADDDDGESEFLNSHSKPEIVDMLRKHTYNDELEQSKRSRGVVRRRGSAAVGTASSISGACFTKAREQLFEKAVTPSDVGKLNRLVIPKQHAEKHFPLQSSNGVSATTIAAVTATPTAAKGVLLNFEDVGGKVWRFRYSYWNSSQSYVLTKGWSRFVKEKNLKAGDTVCFHRSTGPDKQLYIDWKTRNVVNNEVALFGPVGPVVEPIQMVRLFGVNILKLPGSDTIVGNNNNASGCCNGKRREMELFSLECSKKPKIIGAL

SEQ ID NO: 30247 - protein, 218 aa, Glycine max
  Clone ID: TF_GmC1209_1.pep
SDNKKKKYKGVRMRSWGSWVSEIRAPNQKTRIWLGSYSTAEAAARAYDAALLCLKGSSANLNFPSSSSSSQHYIIPQDTAMMSPKSIQRVAAAAANNFLDNNAIAINNATTPPSPPLASTSSSFVSSPSMSSSSPLDQIDDDVSLLTPFGAYTTTTATTICDETNESMAMMESWYDLEGLQSPKYVDQMLSGAFFDIDSTQLLDDLYEESDIRLWSFC

SEQ ID NO: 30248 - protein, 202 aa, Glycine max
  Clone ID: TF_GmC8074_1.pep
MVSATVDSDFAFLESVQQYLLGHDSINLMSETHQAASHDPFSDPNKCDGDSGNIAFRSEDATAVVARDHAPPTWKHYRGVRRRPWGKFAAEIRDPKKNGARVWLGTYDTEEKAALAYDKAAFKMRGQKAKLNFPHLIDSDNSDELSEPVMMTTSKRSLLEISSPSSSCSDDSSESQGTKRRKSLAELLNKLAKNRSQVKVEC

SEQ ID NO: 30249 - protein, 142 aa, Glycine max
  Clone ID: TF_GmC120748_1.pep
MDSQSETQQLAVPKMEDFYFGDHQQDLKAMIVPGFKALSGTNSGSEVDDSTSNKTVTRVAPAALGGAHSGESNCKGSALTLCDVAANGSDDSNNKAVVAVGFDTRKKVAHTFGQRTSIYRGVTRHRWTGRYEAHLWDNSCRR

SEQ ID NO: 30250 - protein, 87 aa, Glycine max
  unsure (1)..(87): unsure at all Xaa locations
  Clone ID: TF_LIB4281-010-R1-K1-F12.pep
VFAFIECRDCGKQVYLGGFDTAQAAARAYDRAAIKFRGVEADINXSLSDYEEDXKQMRGLSKEEVVLLLRRQINGSSRSSTYKGALA

SEQ ID NO: 30251 - protein, 240 aa, Glycine max
  Clone ID: TF_GmC995_9.pep
TDSSEDETEKVQSPRRVKRNVSEISLPPLPPPFTTTPETSSCQPQSKKRVLTHPPSTRRNTSGKFRGVRQRKWGKWAAEIRDPFQSTRIWLGTFNTAEEASQAYEARRLEFEAMAEAQAYKTSSVSEPLATISDNKSNCCNSSAAAISAAAVSAADVSVSEKFSTTFDDLEESPNFGLDFDWLSFNDYGQGFDDFGGLEDIHIGGFDDNEPTELPDFDFGDFGADEFAGWIEEPLNIPCA

SEQ ID NO: 30252 - protein, 99 aa, Glycine max
  unsure (1)..(99): unsure at all Xaa locations
  Clone ID: TF_jC-gmX3056002C06sg22N22a1.pep
MAEVHCEGKNYKGVRMRKWGKWGCLIRLPNRRQRIWTGSYNTAETAARGXHAVMLWSRGRSAQFNFPDYPPDMAGGTLMTPKQRQMAAEQFANTGPHQG

SEQ ID NO: 30253 - protein, 90 aa, Glycine max
  Clone ID: TF_GmC6107_8.pep
MSLFLLRFLHFSNYIKGSTTAKSVAFQVRAEKFANRKRKNQYRGIRQRPWGKWAAEIRDPRKGVRVWLGTFNTAEEAARAYDAEARKIRG

SEQ ID NO: 30254 - protein, 185 aa, Glycine max
  Clone ID: TF_GmC112_1.pep
MQKRRAGRKKFHETRHPVYKGVRQRNGKWVSELRQPNNKNARVWLGTFAHPDMAAIAYDVAALAFKGDSASLNFPNAATSFPRLNSRTCSVRAIQFAATQAAEKHFSCVESQQLQREGSGSGSFSLDDDSSEFSSQGRFFWDEEEVFNMPELLNCMAEALIITPPALERGFNWVGGETTVDLTLW

SEQ ID NO: 30255 - protein, 163 aa, Glycine max
  Clone ID: TF_16347094.pep
VASLASSSARPKFPNLTLFLPEPSMVYSSISSSNIKGGEVMSATSDPSYHVSQFGQNQHQAGSGDAHKMNNNLTNSRSKSFNENWLSATRTQPLKYGGRGKLFKGVRQRHWGKWVAEIRLPTNRTRVWLGTFDSAEDAAIAYDTAAYILRGEYAQLNFPELSM

SEQ ID NO: 30256 - protein, 346 aa, Glycine max
  Clone ID: TF_GmC6807_1.pep
MKNNRDKEKGNDVDQSYRQHHTLSMPMMFSGLNREKEMSAMISALTHVVCGEDEHHGADYSLLNHNINNTNSAVVGDDDFTVTSNMASGSMPPSSTCSSQGGNSVLKRRREYDNTNDFSRGGSFPAISTIAESSSTVTRRTANTVYDYEYRTENVKVVEEEPRRKYRGVRQRPWGKWAAEIRDPFKATRVWLGTFETAEDAARAYDQASLRFRGNKAKLNFPENVRLRQQQEPPLNLNPPPPPNHGAILSIPSTTVHTEALQGSLGSSNFYEHSYSHLHEFPVSLYDQIAESTSTTMASHHLQFLPPASSSTMTMTSPQAPPSIYPTHPAAWSSGYSYNSSSSASG

SEQ ID NO: 30257 - protein, 310 aa, Glycine max
  Clone ID: TF_GmC1423_1.pep
CVTSSPAITNTVATDTKKRGLQMVDQNQKQIGHRKSIDTFGQRTSQYRGVTRHRWTGRYEAHLWDNSCKKEGQGRKGRQVYLGGYDMEEKAARAYDMAALKYWGPSSHINFPLENYQNELEEMKNMTRQEYVAHLRRKSSGFSRGASMYRGVTRHHQHGRWQARIGRVAGNKDLYLGTFSTQEEAAEAYDIAAIKFRGVNAVTNFDITRYDVEKIMESNNLLSSEQAKRKREMDDGTRSEATVNQKPSTTQETVLMQKRCRSQSEWKMVQFPSSQQLDQYPQRIEGCRTQPFSTALDNMFLKQVERKRRT

SEQ ID NO: 30258 - protein, 147 aa, Glycine max
  Clone ID: TF_GmC1388_2.pep
MAPRDINRSNVVVVAGVSNPTHKEIRYRGVRKRPWGRYAAEIRDPGKKTRVWLGTFDTAEEAARAYDTAAREFRGTKAKTNFPTHAAAARSPSQSSTLDSSSAPPLDLTLAGPLTAAGALVFSGGASRGVLRRFCACRGARVVRSCR

SEQ ID NO: 30259 - protein, 109 aa, Glycine max
  unsure (1)..(109): unsure at all Xaa locations
  Clone ID: TF_jC-gmle01810047f08a1.pep
LLLWRRGIIPQATLSVNGNGNSGLKEEHFRGVRKRPWGRYDAEIRDPGEKSRVXLGTFEHRGLMQPRVYDAGARELCGHTANDNTSLRPWENVKNSSHIQSRTEQSFSR

SEQ ID NO: 30260 - protein, 114 aa, Glycine max
  Clone ID: TF_21994429.pep
MVEPPAAAATSESDTTGNTNTPSPSSSSSSSSSKKRARDNNNNSNSSSNKHSVYRGVRMRTWGKWVSEIREPRKKNRIWLRNVAHTQMAARAHDVGALKIKGSPAFFNFPKLGA

SEQ ID NO: 30261 - protein, 226 aa, Glycine max
  Clone ID: TF_GmC945_1.pep
MNIFKSPLDHDLNCGGIFHDSAEASYSSETRSTPSDEEVILASARPKKRAGRRVFKETRHPVYRGVRRRNKNKWVCEMRVPNNNSRIWLGTYPTPEMAARAHDVAALALRGKSACLNFADSRWRLTVPATTNAEEIRRAAGEAAEAFAVADGDDVNIEQQQSVMATNDDEVQEPLQQEEVQDLHDLLLSIANEPLMSPPPCARDGRDWNDVDIFDDDEISLWNFSI

SEQ ID NO: 30262 - protein, 416 aa, Glycine max
  Clone ID: TF_GmC1811_1.pep
MAMFDLNVDINHCDADADSSCDQKGLVLQSFPPEISDSRTSSSSVWNPVEEDSSNNSSPLIFDILKKERDESEFDAATERVNKEQNMAPQEAEIVARTLFPVTAAVDKGVRVPDFKLGLWGKTECLNLSLPEPDGQNGLRTLQQKVPPVRKNRRGPRSRSSQYRGVTFYRRTGRWESHIWDCGKQVYLGGFDTAQAAARAYDRAAIKFRGVDADINFSLSDYEEDLKQMRNLSKEEFVLLLRRQINGISRRSSTYRGALALRKDAQGEPRMGPFVGMTCYPKPSINCDDGKAEASFKPCSYKGEIIVNSNMTGTCHNLDLSLGISPSSKRLKNNDYSGGYSFGCMTCKIPEERGPMEKVMVDRIKNVPLQKISNLAWQLCSNGSIVPRPFQPNAASSGFVSSSSCLITRTSNQHTY

SEQ ID NO: 30263 - protein, 147 aa, Glycine max
  Clone ID: TF_GmC1707_1.pep
MEGEEGGIATKKRGKEGETETTRYKGIRMRKWGKWVAEIREPNKRSRIWLGSYSTPVAAARAYDTAVFHLRGPSARLNFPELVAAEGPAADMSAASIRKKATEVGARVDALHRQHPHALPAGEFADRVDLNKMPEPENSDCDYWDRD

SEQ ID NO: 30264 - protein, 62 aa, Glycine max
  Clone ID: TF_LIB4167-012-R1-N1-B8.pep
HILLSNIGTQEKTAHAYDITAIEYRGIHAVTNFDLSTYIKRLKPSGGGTPKANLESHAGLEH

SEQ ID NO: 30265 - protein, 409 aa, Glycine max
  unsure (1)..(409): unsure at all Xaa locations
  Clone ID: TF_GmC6107_1.pep
MSLFLLRFLHCSNYIKGSAKTKALLLHRLAEDRLFLFSYSSIFPPLGTDAFVILRVLLCFSSEMCGGAIISDFIPAAAIAGSRRLTADYLWPDLKKRKSDLDVDFEADFRDFKDDSDIDDDDDDHQVKPFAFAASSRLSTAAKSVAFQGRAEISANRKRKNQYRGIRQRPWGKWAAEIRDPRKGVRVWLGTFNTAEEAARAYDAEARRIRGKKAKVNFPEAPGTSSVKRSKVNPQENLKTVQPNLGHQSSVLATITWXLVEQKPLVXQYANMASFPGSGNGLRSLPSSDDATLYFSSDQGSNSFDYAPEISSMLSAPLDCESHFVQNANQQQPNSQNVVSIEDDSAKTLSEELVDIESELKFFQMPYLEGSWGDTSLESLLSGDTTQDGGNLMNLWCFDDIPSMAGGVF

SEQ ID NO: 30266 - protein, 254 aa, Glycine max
  Clone ID: TF_GmC1772_2.pep
MNILGQSFNESNNGSYSCSSPETGSSSNIPNTFHSDEEVHTLASARPKKRAGRRIFKETRHPVYRGVRRRNNNKWVCEVRVPNDKSTRIWLGTYPVPEMAARAHDVAALALRGKSACLNFADSAWRLPLPASTNAKEIRRVAAAAAVAIAAEDSCGEQLQNSIVNDAVADDCEVSRSDVSFDEDSNSNKGLRVFCDLDEITMADAPVFEDMREWLQSMADEPLRSPTFVTYVNVRDVWNFVEDDAEVSLWSFTI

SEQ ID NO: 30267 - protein, 422 aa, Glycine max
  Clone ID: TF_GmC55_1.pep
MKRMNESNNTDDGNNHNWLGFSLSPHMKMEVTSAATVSDNNVPTTFYMSPSHMSNSGMCYSVGENGNFHSPLTVMPLKSDGSLGILEALNRSQTQVMVPTSSPKLEDFLGGATMGTHEYGNHERGLSLDSIYYNSQNAEAQPNRNLLSHPFRQQGHVNVETHPYYSVFACRGLSGVSVGTVGCGELQSLSLSMSPGSQSSCVTAPSGTDSVAVDAKKRGHAKLGQKQPVHRKSIDTFGQRTSQYRGVTRHRWTGRYEAHLWDNSCKKEGQTRKGRQVYLGGYDMEEKAARAYDLAALKYWGPSTHINFSIENYQVQKKKKKKKKKSGCVAHLRRKSSGFSRGASIYRGVTRHHQHGRWQARIGRVAGNKDLYLGTLAPRAYGTQEEAAEAYDVAAIKFRGANAVTNFDISRYDVERIMASSN

SEQ ID NO: 30268 - protein, 418 aa, Glycine max
  Clone ID: TF_GmC601_1.pep
MASSSSDPGKSAETSEAALVVANDQLLLYRGLKKAKKERGCTAKERISKMPPCAAGKRRSIYRGVTRHRWTGRYEAHLWDKSTWNQNQNKKGKQVYLGAYDDEEAAARAYDLAALKYWGPGTLINFPVTDYTRDLEEMQNVSREEYLASLRRKSSGFSRGLAKYRGLSSRWDPSYGRMSGSDYFNSMHYGAGDDSAAESEYVSGFCIERKIDLTSHIKWWGSNKSRHSDVGTRLSEEKKLGSAGDICIEIKQLEQKVQPTAPYQMPQLGRPQNEKKHRSSSVSALSILSQSAAYKSLQEKASKTLENIIDNDENENKNTINKLDHGKAVEKPSNHDGGNDRLDIATGMSGTMSLQRNVYPLTPFLSAPLLTAYNTVDPLVDPVLWTSLVPMLPAGLSHTAEVTKTETSSTYTMFRPEE

SEQ ID NO: 30269 - protein, 188 aa, Glycine max
  Clone ID: TF_GmC90_1.pep
MRSSNGTSSSRASNGNTGRHPVYRGVRRRSSGKWVSEIREPKKPNRIWLGTFATPEMAAIAYDVAALALKGKDAELNFPNSASSLPIPASSAAHDIQMAAALAATAVGAANDALEGSQGGNVSVSLAEEFSGGNLNHFVDEDLIFDMPNILVNMAEGMLLSPPRFDNFAATDYEYMDEDPNLWGFPNY

SEQ ID NO: 30270 - protein, 188 aa, Glycine max
  Clone ID: TF_GmC90_2.pep
MRSSNGASSSRASNANTGRHPVYRGVRRRSSGKWVSEIREPKKPNRIWLGTFATPEMAAIAYDVAALALKGKDAELNFPNSASSLPVPTSSAARDIQMAAASAAAAVGAANDALEGSRGGNASVSLTEEFSGGNLNHFVDEDLIFDMPNILVNMAEGMLLSPPRFDNFAATDYEYMDEDPNLWGFPNY

SEQ ID NO: 30271 - protein, 188 aa, Glycine max
  Clone ID: TF_GmC718_1.pep
MRVSTETEPETKKIKRIRGGGDSSKHPLYRGVRMRNWGKWVSEIREPRKKSRIWLGTFPTPEMAARAHDVAALSIKGPAAILNFPHLANSLPRPASLAPRDVQAAAAKAAHMDPSSLSSLVSAMDLSSASDELSQIIELPSLESTDDGSVDLKKEFVFVDSLDAWMYQPPFGFDTEQDTGFEGLMWNY

SEQ ID NO: 30272 - protein, 188 aa, Glycine max; identical to SEQ ID NO: 30271
  Clone ID: TF_GmC718_2.pep

SEQ ID NO: 30273 - protein, 147 aa, Glycine max
  Clone ID: TF_uC-gmroLIB3259P226b12b1.pep
MNASNHEICYSPTYNSFPSSTTFRLEGVHDAEGSLACKREHPKVEREVHAPPAWKRYRGVRRRPWGKFAAEITDPKKNGARIWLGTYETEEEAGLAYDRAAFEMRGSKAKLNFPHLIGSHAPLKPIRVLTKTLKQNLLESDLSYSSA

SEQ ID NO: 30274 - protein, 293 aa, Glycine max
  Clone ID: TF_GmC55771_1.pep
HKEYRAANVKVDPRRLHGKLPLSSQASEEKEDTVEEFDAYNNYASWSSETDMSEMVSALAQVMGTTNRNPYMPQSTSFPFSTSVVKDQPQPYPSQPPPDQEVAKKPHYRGVRQRPWGKWAAEIRDPKKAARVWLGTFETAEDAALAYDKAALKFKGTKAKLNFPERVHQDVPFMQQHQQRSSNRNVFPIHATSTTSSATGSVSSVDAVAPPSLSTHDQHGHQVFPNLYQYAQILSSDDAQLPYFTSHLFNQQQQQQQQQPFNSQFSSTFSSTSSYFYNQQQQYDQQGHDHSNH

SEQ ID NO: 30275 - protein, 108 aa, Glycine max
  Clone ID: TF_GmC3803_2.pep
TRPIWLGSYTTPMAAARAYDTAVFYLRGPTARLNFPELLFQDDQEEGNDSVQHGAAAGNMSADSIRRKATQVGARVDALQTALHHHASSTNSLKPDLNEFPKLESLQD

SEQ ID NO: 30276 - protein, 234 aa, Glycine max
  Clone ID: TF_GmC188491_1.pep
MDFDSSFFQYQNFNSSFVNSSVCAEPFPWEDFLFFNEENTTTTTTALDSFTITDHSSQSQIKESSSSDYSNSSGSLVSSTESSQLEVSSNLTHASHQLKETHASPQPQPPKETNKDKRPFRGVRRRPWGKFAAEIRDSTRNGVRVWIGTFDTAEAAALAYDQAALSTRGSMAVLNFPEEVVRESLKDMQSNNKPISLEDGSSPVLALKRKHTMRRKSRLPTKKTKGTMEWNHKM

SEQ ID NO: 30277 - protein, 178 aa, Glycine max
  Clone ID: TF_GmC768_2.pep
TPEETTAEKTSNLDLIRQHLFGENIISDSSSFVSNLHHHPVKLEPPSSPEFECTSYILDNNTSSNFFTFLEGYDLPTMKKSEHYDEAKRYRGVRRRPWGKFAAEIRDPTRKGTRVWLGTFDSEIDAAKAYDCAAFKMRGQKAILNFPLEAGESDPKPNNSCGRKRRRDQNHDHEFELP

SEQ ID NO: 30278 - protein, 261 aa, Glycine max
  Clone ID: TF_GmC887_1.pep
MRRKKKLSTFPIIHPTPSQNRKEQASPSPFSLLMSNNKNTTFFPTPHGQIRTSEFVNSQNPPQATNQGIDDIRKKHYRGVRQRPWGKWAAEIRDPKKAARVWLGTFDTAEAAAMAYDAAALRFKGNKAKLNFPERVVMPIQPQTNNNNSTSSSAPTTQSSSSLPPPQSLHNNSSLSAEGFPNLEEYARLLSCSDDDDFQRVALGLYQHHNNEDFICGSSQPPPVPFFVSSSSSSSAMTSSYSDFLGQGGSTGFDEGNKRGS

SEQ ID NO: 30279 - protein, 166 aa, Glycine max
  Clone ID: TF_GmC23803_1.pep
MCGGAIISDFIDVNLNSGRKLTTHNTHHQLHTFSDFHATSSSKHQPSYQDPNLPRPPPLPNNQGVKLKALTLNTGRVRKNVYRGIRQRPWGKWAAEIRDPRKGVRVWLGTFNTAEEAARAYDNAAKRIRGDKAKLNFPDSKNPCLNPFQLKHLFSNLESFLGLDSL

SEQ ID NO: 30280 - protein, 533 aa, Glycine max
  unsure (1)..(533): unsure at all Xaa locations
  Clone ID: TF_GmC1761_1.pep
MWDLNXSPDQRINKDEESEEGCSSLKITSFDGDDENNNNKGKRLESVSNSSSSAVVIGDGSEEEYEEEEEDEEGVGVGGGRSMKKRSSKIFGFSVTQNEEESMDSDHPPVTRQFFPVEDADVAVATGGGGTGVSSTFPRAHWVGVKFCQSETLGTGKSSVEVSQPMKKSRRGPRSRSSQYRGVTFYRRTGRWESHIWDCGKQVCLGGFDTAHAAARAYDRAAIKFRGVEADINFNIEDYEDDLKQMSNLTKEEFVHVLRRQSTGFPRGSSKYRGVTLHKCGRWEARMGQFLGKKYVYLGLFDTEIEAARAYDKAAIKCNGKEAVTNFDPSIYNNELNTESTGNAPDHNLDLSLGNATSKPGNNQALGNHATNAVTHDQHLPSESNWRNGGNKPKLVNILPKPCNRSNNKDSHGRDVHGESETLRMLSQTHLHSPAFNEMQQRYGPYRSPGGESQMLQNFAHIHPPNFHFPRSSIGGRIGSDLSLSVADQQQWQTGPSRYLATAAASSSFQQEIRPSSQGWLQKNGLHSLMRPS

SEQ ID NO: 30281 - protein, 145 aa, Glycine max
  Clone ID: TF_GmC194109_1.pep
MKRSPASSCSSSTSSVGFEVHHPIEKRRPKHPRRNNLKSQKCKQNQTTTGGRRSSIYRGVTRHRWTGRFEAHLWDKSSWDNIQSKKGKQVYLGAYDTEESAARTYDLAALKYWGKDATLNFPIETYTKDLEEMDKGSREGILASL

SEQ ID NO: 30282 - protein, 247 aa, Glycine max
  Clone ID: TF_GmC884_5.pep
HASGSKYRGVTLTKCGRWEARMGQFLGKKAYDKAAIKCNRREAVTNFEPSIYESEMKPEAINEGGSHDLDLNLGIATPGHGPKENRGHLQFQSIPYNMHPGRSSRMETNVNSVIGDPSLKRLVVTEERPSVYSTFFPNLERAERMGIDPSKGVPNWAWQTNGQVNATPVPPFSTAASSGFSISATFPSTAIFPTKSMNPIPQSFCFTSHSTPGSNAPQFYYEVKSSQAPSQPLSCNTSINGSPPHKF

SEQ ID NO: 30283 - protein, 203 aa, Glycine max
  unsure (1)..(203): unsure at all Xaa locations
  Clone ID: TF_GmC1366_1.pep
MARPQQRXYRGVRQRHWGSWVSEIRHPILKTRIWLGTFETAEDAARAYDEAARLMCGARARTNFPFNPNVSHSSSSSSKLLSSTLTAKLHRCYMASLQVTRQALASESQRTPPSVQNATTSTTTPISNNFSVKSEQTHAVLPHKRPEEEQESEANRGVKRVNSVENVPLQFKPLEEDHIEQMIEEXLDYGSIELCSVISPQAL

SEQ ID NO: 30284 - protein, 116 aa, Glycine max
  unsure (1)..(116): unsure at all Xaa locations
  Clone ID: TF_LIB3242-517-P1-J1-E5.pep
GHAEKCAKRLMKNQYRAIRRPPWGKGAANIRXPMXGVRVWLATFSSAEEAARPYHAXSRRIHGQKPYVNLPDEPSCAVSLKPMTAIPYAQPMNKYLYSLKPKINHMLHFADILECF

SEQ ID NO: 30285 - protein, 296 aa, Glycine max
  unsure (1)..(296): unsure at all Xaa locations
  Clone ID: TF_GmC6807_2.pep
MMKNDREKGNEVDQSYIQQHHSLSMPMMFSGFNREKEMSAMITALTRVVCGDYSLVHHNIDNTNSAIVGGGGGDDVSNMASGSMPPSSTSLSHGGNSVLKRRREDDNTSDFLRGGSFPAILTTAEGSSTIRRRRANTVYDYEYRREKVKVGEGXEASRKYRGVRQRPWGKWAAEIRDPLKARRVWLGTFETAEDAARAYDQASLRFRGNKAKLNFPENVRLRHTETLQGSRASSNFYDNSYSHVHDLPVSLYDQTTMASSSTISMTSPQAPPSIYPTHLLPAWSSGYAYNSSSSSA

SEQ ID NO: 30286 - protein, 172 aa, Glycine max
  Clone ID: TF_GmC243461_1.pep
MPVHALPFSKDSPPPKPKEAHFRGVRKRPWGRFAAEIRDPWKKTRKWLGTFDTAEEAARAYDAAARTLRGPKAKTNFSYILAPAFHLPPPVLTTPEAHALAQAQAQEQLARQVEFCGPPFFFATDVASTAPVRSEYKGYKLENIAGFVVSKEEQKEKNKPFLFDLNLPAPLF

SEQ ID NO: 30287 - protein, 144 aa, Glycine max
  Clone ID: TF_LIB5118-012-Q1-PF1-H7.pep
MENLSPLIYKNPIRRTSRRSTMYLGVRKRPWGRYAAEIRNPYTKERHWLGTSDTAEEAAIAYDLSSIKICGINARTNFHYPFVSLPPLPMSSLPPPPPPPTPELDPSVEVCLEMMNAASYDGDDESLVIASILQSFSNSGNCSF

SEQ ID NO: 30288 - protein, 191 aa, Glycine max
  Clone ID: TF_GmC636_1.pep
MEQELPRSSVPDDDAATTTSSVDKPAIPHAGGTRHPLSGGVPARRWGRWVSHPLFRGVRKRRWGKWVSEIREPRKKSRIWLGSFPAPETHGNFPDEVHRLPPLPSSCTARDIQAAAAKAAHMMMVQAATADSPEKSSSITSDCGGRGGDDFWGEIELPDMFDGKWWASDHDVTPWPELELPPQPPFTTASL

SEQ ID NO: 30289 - protein, 233 aa, Glycine max
  Clone ID: TF_GmC120268_1.pep
MVEPAVAASSELSDSTRNTNTNTPSPSSSSSLSPSPSPSSSSSKKRARDNNNSRNNSNKHSVYRGVRMRTWGKWVSEIREPRKKNRIWLGTFATAEMAARAHDVAALTIKGSSAILNFPELAASLPRPASNSPRDVQAAAAKAASMEAPPRTPPSPAATPEDDLGEIVELPPLGTSFDSPDRSSEFVFLDMDDGWPYSHPWYHSIYDGGYFISDMNNMVSMQESESMVLSLWP

SEQ ID NO: 30290 - protein, 126 aa, Glycine max
  Clone ID: TF_GmC755_2.pep
RDSPPQRSSIYRGVTRHRWTGRYEAHLWDKNCWNESQSKKGRQGAYDDEEAAARAYDLAALKYWGQDTILNFPLSNYEEKLKEMEGQSKEEYIGSLRRKSSGFSRGVSKYRGVARYLNPALFTAKC

SEQ ID NO: 30291 - protein, 219 aa, Glycine max
  Clone ID: TF_GmC321_1.pep
MAPRDKTSAVKPSGNAGVKDLHFRGVRKRPWGRFAAEIRDPAKKTRVWLGTFDTAEEAARAYDAAAREFRGPKAKTNFPLPSENFKNASPSQSSTVESSSRDRDVAADSSPLDLNLAPVAVSSARFPFRNQFPVFPGAVPAANQVMYFDAVLRAGMAGPRGFAFGYNPHPVAASEYHATTSDSDSSSVIDLNHNEGVVKGNGSRMFDLDLNHPPPHEIA

SEQ ID NO: 30292 - protein, 561 aa, Glycine max
  Clone ID: TF_GmC12225_1.pep
MNNNWLSFPLSPTHSSLPAHDLQATQYHQFSLGLVNENMDNPFQNHDWNLINTHSSNEIPKVADFLGVSKSENQSDLAALNEIHSNDSDYLFTNNSLVPMQNPVLDTPSNEYQENANSNLQSLTLSMGSGKDSTCETSGENSTNTTTTTTVEVAPRRTLDTFGQRTSIYRGVTRHRWTGRYEAHLWDNSCRREGQSRKGRQVYLGGYDKEEKAARSYDLAALKYWGTSTTTNFPISNYEKELDEMKHMTRQEFVAAIRRKSSGFSRGASMYRGVTRHHQHGRWQARIGRVAGNKDLYLGTFSTEEEAAEAYDIAAIKFRGLNAVTNFDMSRYDVKAILESNTLPIGGGAAKRLKEAQALESSRKREEMIALGSSTFQYGTTSSNSRLHAYPLMQHHHQFEQPQPLLTLQNHDISSHFSHQQDPLHQGYIQTQLQLHQQQSGGSSSYSFQNNNINNAQFYNGYNLQNHPALLQGMINMGSSSSSSVLENNNSTNNNVGGFVGSGFGMASNATSGNTVGTAEELGLVKVDYDMPTGGYGGWSAAAAAESMQTSNSGVFTMWND

SEQ ID NO: 30293 - protein, 208 aa, Glycine max
  unsure (1)..(208): unsure at all Xaa locations
  Clone ID: TF_GmC1399_3.pep
MYGQSSSSSSSYESDLALLDSIRHHLLGESESIFGAPNFGSGRSSSFSSLDSCLSDNWGELPFKEDDTEDMVLYGVLRDAVNVGWVPSLDAGSPESVSSGFPAVKLEPDLMPALIRLEXSVRIAAEEKKVVPAKGKHYRGVRQRPWGKFAAEIRDPAKNGARVWLGTFETAEDAALAYDRAAYRVGTVQEQVGSQVAECTRGEQLLVS

SEQ ID NO: 30294 - protein, 127 aa, Glycine max
  Clone ID: TF_9564630.pep
MASSSSLSSSKRHPLYHGIRCRGGKWVTEIREPRKTNRIWLGTFLTPEMAAAAYDVAALALKGGEAVLNFPDSVGGYPVPASKSPADIRTAAIAAAELMKPEASHNNNNVNASTTNEAEVVQYDNNN

SEQ ID NO: 30295 - protein, 309 aa, Glycine max
  Clone ID: TF_GmC1816_1.pep
MAATMNFYNETSQQVQSDPFRGELMEVLEPFMKTCPSSTPSILSSDSPSPSPLNFPSSSLLSPHPNFYTHTPPPSYLLQSQQSLIGFEQPPSSLLGLNHLSPSQISQIQAQIEAQQSQNQNPHSLNFLGPKPVPMKHVGGPPKPTKLYRGVRQRHWGKWVAEIRLPKNRTRLWLGTFDTAEEAALAYDKAAYRLRGDFARLNFPSLKGSCPGEEYKPVHSAVDAKLDAICANLAEMQKQGKTEKGARSAKKSKQGPNQEAKPEPQASAESEGSADSSPLSDLTFDVTEPQWEHFNLQKFPSYEIDWDSL

SEQ ID NO: 30296 - protein, 230 aa, Glycine max
  Clone ID: TF_GmC1388_1.pep
MAPRDINRSNVVVVAGARAAALLSDQFFLGLRITNSSKKLTLMAPRDINRSNVVVAGGSNPTRKEIRYRGVRKRPWGRYAAEIRDPGKKTRVWLGTFDTAEEAARAYDAAAREFRGAKAKTNFPTHAELTHAAARSPSQSSTLDSSSPPTPPLDLTLAAPLAAGGALVFPVARPVVFFDAFERAEVRASFDLPVAAFSDSDSSTVMDYERGSRRRVLDLDLNVPPPPEVA

SEQ ID NO: 30297 - protein, 276 aa, Glycine max
  Clone ID: TF_GmC88_2.pep
HASGDFGAFLAVIKLFDSSTVYLGGYDKEEKAARSYDLAALKYWGPTATTNFPVSNYSKEVEEMKHVTKQEFIASLRRKSSGFSRGASIYRGVTRHHQQGRWQARIGRVAGNKDLYLGTFATEEEAAEAYDIAAIKFRGANAVTNFEMNRYDVEAIMKSSLPVGGAAKRLKLSLESEQKALPVSSSSSSNQQQNPQCGNVSASINFSSIHQPIASIPCGIPFDSTTAYYHHNLFQHFHPTNAGTAASAVTSANANALTALPPTAAAEFFIWPHQSY

SEQ ID NO: 30298 - protein, 179 aa, Glycine max
  Clone ID: TF_GmC331_1.pep
MSRSSAMHGITSTNNKLKGVRRRKWGKWVSEIRVPGTQERLWLGTYATPEAAAVAHDVAVYCLSRPSSLDKLNFPETLSSYSVQLRDMSPRSVQKVASDVGMDVDARNIVAGKTSTVGAETNCESDERTSTASVCNVVGEGGADHSDVFWWDDDGGSWHGSGGDSTERDALSISIEDYL

SEQ ID NO: 30299 - protein, 114 aa, Glycine max
  Clone ID: TF_GmC1399_5.pep
PAKNGARVWLGTFETAENAALAYDRAAYRMRGSRALLNFPLRINSGEPEPVRVTAKRYSPEPSSSSSDSASSTKRRKKVVGSTVTAQSGLRKEQVGSQVAHSAHVESSCWSTNA

SEQ ID NO: 30300 - protein, 158 aa, Glycine max
  Clone ID: TF_GmC566296_1.pep
MEGGRSSVSNGNVEVRYRGIRRRPWGKFAAEIRDPTRKGTRIWLGTFDTAEQAARAYDAAAFHFRGHRAILNFPNEYQSHNPNSSLPMPLAVSAPPSYSSSSSTSNYSGDDNNNHLVRPAFSGEIMQGGDHDDDTFELEYFDNKLLEELLQMQDNRHF

SEQ ID NO: 30301 - protein, 106 aa, Glycine max
  Clone ID: TF_GmC31_2.pep
MVSTKKEATCYATRRYRGVRRRPWGKFAAEIRDPKKKGSRVWLGTFDTEIDAAKAYDCAAFRMRGHKAVLNFPLEAGMSHPEPNSSGRKRRRDYTTAVTSSSHVMS

SEQ ID NO: 30302 - protein, 263 aa, Glycine max
  Clone ID: TF_GmC106_1.pep
ASDSSSLLHQHHHHQQQHQQHQQQLLQYWSDALNLSPRGMLTRLGPDGRPLFRLPTQPINTTKLYRGVRQRHWGKWVAEIRLPRNRTRLWLGTFDTAEDAAMAYDREAFKLRGENARLNFPELFLNKDKKEEQQQQEQEASSPVLSAIAKQHEPSSEHRDVPIEESNENDSGDATVSDDQVHATTESSEGVSQEMVWGEMSAWFNAIPAAWGPGSPMWDDLDATNNLLCQSHIPFSNPNQQELNDAERQEQNTGPGYLWKDQD

SEQ ID NO: 30303 - protein, 115 aa, Glycine max
  Clone ID: TF_13787956.pep
IYRGVRTRDCVKRVADIQRPKNQTRVWMGTLNTDYEATLAYYKGAHKLGGDYARLNSTKLRHHCCDTGGDLREYNPVHSVPDAKLNAMSEGLSLLQIQVTTGNPPKKTRSKLNSA

SEQ ID NO: 30304 - protein, 167 aa, Glycine max
  Clone ID: TF_GmC36407_1.pep
MDSSSHQLLPFNENDPEDMLLYGIITSCQEKKVTINQEQVNKKRSSFRGVRRRPWGKFAAEIRDSTRHGVRVWLGTFDNAEAAALAYDQAAFSMRGSGAVLNFPVEKVKESLRDMKLDGCSPVVALKRRHSLAAKRKKEDVLVFHDLGADYLEHLVMCSDLPSTTIV

SEQ ID NO: 30305 - protein, 191 aa, Glycine max
  Clone ID: TF_GmC636_2.pep
MEQELQRNSVHDDEAATTTSSGDKPDTPRGGGTRHPLFRGVRKRRWGKWVSEIREPRKKSRIWLGSFPAPEMAGKAYDVTAYCLKGRRAQLNFPDEVHRLPPLPSSCTARDIQAAAAKAAHMMMVQAASADSPEKSSSITSDCDGSGGDDFWGEIELPELLNGKWWASDRHVTPWPETELPPQLPFTTACL

SEQ ID NO: 30306 - protein, 239 aa, Glycine max
  Clone ID: TF_GmC157860_1.pep
FGTRLVTTNYPFCTRCLIHSNNFKERSFSPSNMFSINHFSDPDATSPGSGGSSRPALSDEDFFLAASNPKKRAGRKKFRETRHPVYRGVRRRDSGKWVCEVREPNKKSRIWLGTFPTAEMAARAHDVAAIALRGRSACLNFADSASRLPVPATAEARDIQKAAAEAAEAFRPGKDDDAVAERVAATATEREEEQEEGMVPEYLRNMVLMSPTHCFGSDEYGSADVEFDDAEVSLWSYSI

SEQ ID NO: 30307 - protein, 230 aa, Glycine max
  Clone ID: TF_GmC1595_2.pep
MITDSWGSFAHYAVSVYLGGYDKEDKAARAYDLAALKYWGPTTTTNFPISNYEKELEEMKNMTRQEFVASLRRKSSGFSRGASIYRGVTRHHQHGRWQARIGRVAGNKDLYLGTFSTQEEAAEAYDIAAIKFRGLNAVTNFDMSRYDVKSIANSTLPIGGLSGKNKNSTDSASESKSHEPSQSDGDPSSASSVTFASQQQPSSSNLSFAIPIKQDPSDYWSILGYHNTPL

SEQ ID NO: 30308 - protein, 163 aa, Glycine max
  Clone ID: TF_GmC1970_1.pep
MASSSASREGHYRGVRKRPWGRYAAEIRDPWKKTRVWLGTFDTPEEAALAYDGAARSLRGAKAKTNFPPAPPLCLDLNVPSSDHRWPHVPPRSLVLSEFLHTAVLRDIEPPQLPFPPAAAIVAHRSPHAGGVQVVESSPTASFLGLVRRGIPIDLNEPPPLWL

SEQ ID NO: 30309 - protein, 172 aa, Glycine max
  Clone ID: TF_GmC1970_2.pep
MAPSSSASASREGHYRGVRKRPWGRYAAEIRDPWKKTRVWLGTFDTPEEAALAYDGAARSLRGAKAKTNFPPAPPLCLDLNVPSSDHRWPHHVPPRSLVLSDFLHTAVLRDIDPPQQPFPPAAAVAHRNPHGGAMPVGGGVQVMEGSPTASFLGFVRRGIPIDLNEPPPMWL

SEQ ID NO: 30310 - protein, 174 aa, Glycine max
  unsure (1)..(174): unsure at all Xaa locations
  Clone ID: TF_7233004.pep
MELAPVKSELSPRSHRLLMIDGSEVIGTKCVKRRRRDSSTAVLGGYGQQGEQLEEQKQLGGQSTATTVNRSSRFRGVSRHRWTGRFEAHLWDKGTWNPTQKKKGKQVYLGAYNDEEAAARAYDLAALKYWGISTFTDIPVSDYEKEIEIMKTVTKEEYLASXRRRSSGVSRGVS

SEQ ID NO: 30311 - protein, 262 aa, Glycine max
  Clone ID: TF_GmC699_1.pep
FGSSGSSSSRFGSREYQNQRAKEGRFCEKLKIKNRPKFVGVRQRASGKWAAEIKDTSKKIRLWLGTYQTAEEAARAYDEAACLLRGSNTRTNFSTQGCGVATNSPISLKLRNLLDRKAMSNQSQSQIQRQSSMISSTFQGADTSASPNVSAINKIMVMENYSACSSEGKSLFLVQNHQVCDNPYGLDMNMINCSTGITPNTSQFDYSWPLAQQRINELPISKDDFGLNAERQLSGYATNECHEEDTYAYDVNYPLSHFFCFT

SEQ ID NO: 30312 - protein, 513 aa, Glycine max
  Clone ID: TF_GmC603_1.pep
MLKFCTPLLYNRFILYSISKGVLRRNHTREILGGSWQFKFGPKIVRKKTIVYIVFMSLLTVAHQRGSGEFMRFTESHGGGGGGDGDGEYGYGHDDGRGGGGGGSLGLNFNQVMQQGEVTTQGGTLVSGYNRGDPDLREMVSALTHVVVSSGSGQRSTEWIQQSGFPMMSASSLSCLSSFSSPSSSGASWVGHKRGREEEESSSSHNMIQQQQQSAPRLFRNIGDFMVPSQGDSSSATEEAPTSTTTSVTAVATTVTETPPPPGGGERRRKYRGVRQRPWGKWAAEIRDPHKAARVWLGTFDTEEAAARAYDEAALRFRGNRAKLNFPENVRAVPPIQPFQATTRLTVSDSTTSQFRPLVTEAPPFIQQPQIQGSSDLIRDYLQYSQLLQSDFQQQQIQQQQQQQRQQQQRQRQQRQQQQQQQQQPSSLLQQLYYNAQFASLQSPSMLSSSPSFSSSVSPAPFPLFTTSASFPLFSSQQMGYFQPPESRNPAGGVPEFPTSTWSDTSSQPPPSG

SEQ ID NO: 30313 - protein, 440 aa, Glycine max
  Clone ID: TF_GmC603_2.pep
MSLLTVAHQRGSGEFMRFTESHGGGGGGDGDGEYGYGHDDGRGGGGGGSLGLNFNQVMQQGEVTTQGGTLVSGYNRGDPDLREMVSALTHVVVSSGSGQRSTEWIQQSGFPMMSASSLSCLSSFSSPSSSGASWVGHKRGREEEESSSSHNMIQQQQQSAPRLFRNIGDFMVPSQGDSSSATEEAPTSTTTSVTAVATTVTETPPPPGGGERRRKYRGVRQRPWGKWAAEIRDPHKAARVWLGTFDTEEAAARAYDEAALRFRGNRAKLNFPENVRAVPPIQPFQATTRLTVSDSTTSQFRPLVTETPPFIQQPQIQGSSDLIRDYLQYSQLLQSDFQQQQIQQQSPSSLLQQLYYNAQLASLQSPSVLSSSPSFSSSVSPTPFPLFSTSAQFSSASFPMFSSQQMGYFQLPESCPPAGGVPEFPPSTWSGTSGQPPPSG

SEQ ID NO: 30314 - protein, 127 aa, Glycine max
  unsure (1)..(127): unsure at all Xaa locations
  Clone ID: TF_jC-gmfl02220146c10a1.pep
RDGAGGVDCFSVTLHEQESMDRDHSPVTRQFFPAEDADAAGATFGGGPGLTSTIPCAHWLRVKFCHSYSLCTGKSXGEVFLPMKKSRRGPXSMSSQFRGVTLYHITGRWESHIWHWGKQVYLCGSYT

SEQ ID NO: 30315 - protein, 157 aa, Glycine max
  Clone ID: TF_GmC445884_1.pep
AGNKDLYLGTFSTEEEAAEAYDIAAIKFRGASAVTNFEMRRYDVDAILNNSLPVGGIAKRFKVSPETENKALVSTIQPPQNTNASSSINFSTIQPVSSIPYDSAITCYPHNLFHHFNPTNGESSTAEFAATMTDAIALATLPPLAVPGFFVWPHQNY

SEQ ID NO: 30316 - protein, 140 aa, Glycine max
  unsure (1)..(140): unsure at all Xaa locations
  Clone ID: TF_uC-gmrominsoy058g08b1.pep
MCGGAIICDFIPDAVAAGAGRLTGHYMWPDLKKRKNDLDVDLDADFRDFKDYSDIYYDNDRHDKPFAKASSSCRSTTAKTAALQVRAEKLADRKRKNQSKGIRQRPCGKWSGEMSDPRKEAREWLGTFNTSXEAARAYDA

SEQ ID NO: 30317 - protein, 112 aa, Glycine max
  Clone ID: TF_6724385.pep
MDEEGSRGRAKEDAGDVRYRGVRRRPWGKFAAEIRDSTRQGQRVWLGTFNTAEEAARAYDRAAYAMRGPFAILNFPDEYPMTAGGATNAATYSSAASSSSSASSSRHANVAR

SEQ ID NO: 30318 - protein, 203 aa, Glycine max
  Clone ID: TF_GmC1593_1.pep
MLKSGMGIEERKQVKKPAQASSRKGCMRGKGGPENASCTYKGVRQRTWGKWVAEIREPNRGARLWLGTFETSHEAALAYDAAARKLYGSDAKLNLPELSIKSQSQCPPPPSSQVGVGVPIYTSDSIVSLPLDTNPKPVENDGDFRPSWGTMNEGLPVFDDSIWAEAAMSLDFPQIAAETAIYSSGNNLADVGVWDSLQTPWCM

SEQ ID NO: 30319 - protein, 110 aa, Glycine max
  Clone ID: TF_LIB3242-641-P1-J1-G1.pep
MCGGAMISDFMLLFETSNILRVFWENWLKNGSTTAKSVAFQVRAEKFANRKRKNQYRGIRQRPWGKWAAEIRDPRKGVRVWLGTFNTAEEAARAYDAEARRIRGKKAKVN

SEQ ID NO: 30320 - protein, 240 aa, Glycine max
  Clone ID: TF_GmC953_1.pep
TLISCRCLLEELISVFFVIFPNQRCAPQHILTKAFNFPTPFQMLAKAHNKGDGSKSLAKILAKWKEYNAQIDSSSDADKPIRKVPAKGSKKGCMKGKGGPENSRCNYRGVRQRTWGKWVAEIREPNRGNRLWLGTFPTAIGAALAYDEAARAMYGSCARLNFPNVSVSSFSEESSKDSPSANHCGSSMAVSANESMISPSNSGVDAEEDVDMEPISLSLSVKHENGEGESGISSSPPSSS

SEQ ID NO: 30321 - protein, 209 aa, Glycine max
  Clone ID: TF_GmC768_1.pep
MTTAEETSNLDLIRQHLLGENIISDSSFFSNLLHHPMKLEAPSSPEFDFTSYISDNTSFFTFLEGYDLMADMKFVDSDNTIPSKEVKKCNISPEPLVSSKEKPKKLEYDKAKRYRGVRRRPWGKFAAEIRDPTRKGTRVWLGTFDSEIDAAKAYDCAAFKMRGQKAILNFPLEAGLSDPKPNSCGRKRRRESHDHELELPQVQVHHGVS

SEQ ID NO: 30322 - protein, 323 aa, Glycine max
  Clone ID: TF_GmC307_2.pep
PVEDSELPVSAAAAGSGGGGGGSSFPRAHWVGVKFCQSETPGAGKAVKVSEPMKKSRRGPRSRSSLYRGVTFYRRTGRWESHIWDCGKQVYLGLFDTEIEAARAYDKAAIKCNGKEAVTNFDPSIYDSELNSESSGGVAADHNLDLSLGNSSSKHNNSQTSGNHFANSATDQHMPPESNWRNGGSKPKLVNILPKPCGRSNIEAYGHGESETLRLLSQTHLQSPTNKEMHRYCPYRSPAEPQMPHNFAHHLHQPSFHVPSSSSNRGRIGSDLSLSMSDQQQWQQAGPPHLLATAAASSGFPQQIRPSQGWLQKNGFHSLMRPS

SEQ ID NO: 30323 - protein, 293 aa, Glycine max
  Clone ID: TF_GmC6126_21.pep
MASSSIKHTHHLNRTKLFMKEETLLKKKHHYPKIIRIRVTDADATDSSSDDDEPSMSSTRRRVKNFVNEITIQGGGGGGGDVNVVSKKRRFKSGAGAPLCRRKTGAKKFRGVRQRPWGKWAAEIRDPSRRVRLWLGTYDTAEEAAIVYDNAAIQLRGADALTNFITPPPENRKTGYCSGEESRNNDDLRSPTSVLGRCSVSEEAVTANDVFGGSSECEYSCVSESVFPIPNEVVFDFESTLDMFDEGINNVVAETSIFLAEDLDLGFTSWHRECDNFQDIGGDLFVWDPLVAL

SEQ ID NO: 30324 - protein, 198 aa, Glycine max
  Clone ID: TF_GmC320_2.pep
MAKPSSEKPEEHSDSKYYKGVRKRKWGKWVSEIRLPNSRQRIWLGSYDTPEKAARAFDAAMFCLRGRNAKFNFPDNPPDIAGGTSMTPSQIQIAAAQFANAGPHEGHSGRPEHPPMESPSPSVSEGTIQTDSDVPTLNGSVTDLFTPVGSSGYASDYGIFPGFDDFSGDFYVPEMPNVNYGEENGEGFIVDESFLWNF

SEQ ID NO: 30325 - protein, 277 aa, Glycine max
  Clone ID: TF_GmC4678_2.pep
KYIKCKLTSPVAKPFSITSAPDDDYLSVHIKILGDWTRSLKAKFTQACQQPLNGQSGLLRAECLKGDNSPSSFPKVLVDGPYGAPAQDYREYEVVLLVGLGIGATPMISILKDMVNNFKAIDEEEGIGGAKSPTRLSDFKTSRAYFYWVTREQGSFDWFKGVMNEVAEEDRRKVIELHSYCTSVYEEGDARSALIAMLQSLNHAKNGVDIVSGTRVMSHFAKPNWRSVYKRIALNHPDARVGVFYCGPSALTHELRQLALDFSHNTSTKYDFHKENF

SEQ ID NO: 30326 - protein, 279 aa, Glycine max
  Clone ID: TF_GmC1178_1.pep
MMSRFMHAPSPVLSSSHPHLGVGHKREREDDTGAGASGGVAIAAASSQTQTQEIESAGGDRRRRYRGVRQRPWGKWAAEIRDPHKAARVWLGTFDTAEAAARAYDEAALRFRGNRAKLNFPENVVPVPPPPPVPDLPASAVAGSDSISGSGSVVAGFSPTLMQGAPFQGSSAFLRDYWGYSQLLRSTGDFHGLDQWFFDSQMAAFQSSSSSLLPSPPPPSFSPSSASYPLFSSSQQMGIFRPPGEQGHGGEDGGSGSEFSELPPSTWSDTSGYPPPPPG

SEQ ID NO: 30327 - protein, 279 aa, Glycine max; identical to SEQ ID NO: 30326
  Clone ID: TF_GmC1178_2.pep

SEQ ID NO: 30328 - protein, 136 aa, Glycine max
  unsure (1)..(136): unsure at all Xaa locations
  Clone ID: TF_jC-gmst02400023c03a1.pep
ARAQQRLVTAGCVVAVKCAMRERINHSRGIRQCSWGKWAAEIRDPXKGVRVRLGTFNSAEEAARAYDAAAGRFLGKRANVNLTDEPVGAAVYVXRLKENAEAESMKENLNTVKPNMNQMLNSGHNLQGYYSPVDHV

SEQ ID NO: 30329 - protein, 239 aa, Glycine max
  Clone ID: TF_GmC1169_1.pep
MVQSKKFRGVRQRHWGSWVSEIRHPLLKRRVWLGTFETAEEAARAYDQAAILMSGRNAKTNFPITQTPEGDPKSTTSEDTPSTTSKDLEEILHAKLRKCGKVPSPSMTCLRLDPENSHIGVWQKRAGRRSDSNWVMTVQLGKKSVNVNNNDTHHQADSSSSSSLSSSLPSSEHHHIESPSLAVTGNLHHQEVVRGEIDEEERIALQMIEELLNDRNCPSPSFNNNIQERDGADHDHFFL

SEQ ID NO: 30330 - protein, 184 aa, Glycine max
  Clone ID: TF_GmC1487_1.pep
MDHQPPPCPAAASATDNPRGGTRHPMYRGVRKRRWGKWVSEIREPRKKNRIWLGSFPVPEMAARAYDVAAYCLKGRKAQLNFPDDVDSLPLPSSRTARDIQTAAAQAARMMKASGNDEKSGIASDDGDSGCDDFWGEIELPELMDGECCWGCPAGASSWTSSGDLAEWPEEELSPQQPSFMACL

SEQ ID NO: 30331 - protein, 218 aa, Glycine max
  Clone ID: TF_GmC16307_1.pep
MVQTRKFRGVRQRHWGSWVSEIRHPFLKRRVWLGTFETAEEAARAYDQAAILMSGRNAKTNFPILQTPEGDPKTTLTPIDHETSSSSTTTSKELEEILHAKLRKCGKLPSPSMTCLRLDPENSHIGVWQKRAGQRSDSNWVMMVPPLGKKGGANEGGTGGDASCSNSFPFSECDPTPQVARQELLRTEMDEEERIALQMIEELLSRNCPTSPSFNNLY

SEQ ID NO: 30332 - protein, 213 aa, Glycine max
  Clone ID: TF_GmC1010_1.pep
MDQETTRRNTMQECHVIAPTTTTATSSYRGVRQRKWGKWVSEIREPGKKSRIWLGSYESPEMAAAAYDVAALHLRGRAARLNFPELVETLPRPTSSKPEDVQVAAQQAAVMFRISPTMSPINNHQGCVNDNNIIKGSVVPVRVGLSPTQIQAINESPLDSPKMWMVQMAEALRFGFDDHSMMMLPSDDDDYALELSGWEEIQHESLWDSPEYM

SEQ ID NO: 30333 - protein, 213 aa, Glycine max
  Clone ID: TF_GmC56_2.pep
KGVRMRKWGKWAAEIRDPFKGTRIWLGTFSTAEEASQAYETRRLEFEVMAKALSDEKSNNGSSNNNSVLSHTSPSSVLELDTSASNLIGSGKVSSNEIVETKGLEAEVAETKSLAAEFAELEIQDLSMLNVPSPSAVAAATSEYELDLLAFDSFKYGFDYEHGFDDDFAALEDIHICSFDDNEPSELPDYDFDDFGADEFAGWIEEPLNIPCV

SEQ ID NO: 30334 - protein, 119 aa, Glycine max
  Clone ID: TF_17963946.pep
MENNTIYCDLSPLESVQHYLLEHENDSNTISNVSNHEICLEGVHDSKGLFSCKSEQHVDAREFHTHPVWKHYRGVRRRPWGKFAAEIWVPKSKGGRVWLGTYETEEEAGLAYDRAAFKM

SEQ ID NO: 30335 - protein, 213 aa, Glycine max
  Clone ID: TF_GmC25_6.pep
MVKSKSVEKPAEEQQRGGVSAYRGVRKRKWGKYVSEIRLPNSRQRIWLGSYDSAEKAARAFDAAMFCLRGSGANFNFPSDRPNIAGGRNMTPSQIQIAAARFANSEPRKECSGKPVESLTSIEETTSFPVNSDTDTSSPLSVVTIQNDTEVATGSFPGIFSGFGSGNFVPEFSDFPSFDDFGHDFFVHELPGFDYGEENLDGLIIQDSFLWNF

SEQ ID NO: 30336 - protein, 145 aa, Glycine max
  Clone ID: TF_jC-gmXLIB3563P071cf05a2.pep
MVKSKSVEKPAEEQQRGGVSAYRGVRKRKWGKYVSEIRLPNSRQRIWLGSYDSAEKAARAFDAAMFCLRGSGANFNFPSDRPNIAGGRNMTPSQIQIAAARFANSEPRKECSGKPVVLTSIETTSFPVNSDTDTSSPLSVVTIQN

SEQ ID NO: 30337 - protein, 115 aa, Glycine max
  Clone ID: TF_GmC786295_1.pep
TRVKYRGVRKRPWGKFGAEIRDPTKPTGRQWLGTFDTAEEAARAYDRAAIALRGALAILNFPHEFHSHLPFILSNSSTKGNGSSFDKEVIELEYLDDKVLEELLELEEKRRSNED

SEQ ID NO: 30338 - protein, 242 aa, Glycine max
  Clone ID: TF_GmC700_1.pep
MAELPSSEASSSSASSRKHSSSEAHLPAPDQKRPKQARDSSSKHPVYRGVRMRAWGKWVSEIREPRKKNRIWLGTFATAEMAARAHDVAALAIKGNSAILNFPELAASLPRPDSNSPRDVQAAAAKAAAMEVNDVPTTPSSSSSSASLSLSQSSSWSSLAVSSSSGDGPSTPEELGEIVELPSLGTSFEIPDPSGELVYLDPWPYSQAWSHGIYDESEGYFIGDSETESMILCGFEGSLWQH

SEQ ID NO: 30339 - protein, 100 aa, Glycine max
  Clone ID: TF_GmC250_3.pep
GSSINFPLSTYEKELEEMKHMTRQEFVANLRRKSSGFSRGASVYRGVTRHHQHGRWQARIGRVAGNKTHPLGETHNISIPHDYMTMIHLQRGEKRNGKYK

SEQ ID NO: 30340 - protein, 219 aa, Glycine max
  Clone ID: TF_GmC1715_1.pep
MDSPSSFFNSPSSGFCSESSSPEAFSWEGYLPFNENDPEEMLLYGMIAGATTEEHSGERASSEESAAARKEKSYRGVRRRPWGKFAAEIRDSTRHGMRVWLGTFDSAEAAALAYDQAAFSMRGSAAILNFPAEIVRESLKEMNYAHDDSNNEEGCSPVVALKRKHSLRRKINVRKKKNNNNNSKLQSSTVDNAVVFEDLGPDYLEQLLMSSDHHIPTTF

SEQ ID NO: 30341 - protein, 334 aa, Glycine max
  unsure (1)..(334): unsure at all Xaa locations
  Clone ID: TF_GmC158_1.pep
RPTRPYGCEKTTEGKRTSAVNKRALREDGGGGGGGGAMRYRGVRRRPWGRYAAEIRDPQSKERRWLGTFDTAEEAACAYDCAARAMRGLKARTNFVYPTSPQPSSAXPNTSPRNPSSLNMLLFRDLIHSNPSLLSSSSTQNFHDQFYNKSTSTFSSLPVSPSLAPPSYSMNNSCGGSLSVKMNTFPTCGTNFAEKGDDGDGFFSRESSDSGLLEEIVNKFLPRTKPSKCETTFANPQEESLLLPPLVSESTLVSTGQQYYDDDMKKGFPKNEGLGVFYSDQGFPMQQFDTSNGFNSMAMENDQNIINNAENCVVEDVFQYQELLNAFAIRMQNA

SEQ ID NO: 30342 - protein, 282 aa, Glycine max
  Clone ID: TF_GmC189492_1.pep
MSVHAKLKHHPMNLASPSSHFEDDPPCKTKTKTQRRLLRIIITDHDATDSDSSDEEQQQQQQKTRRVNREITQINMQLPLSHNSSFSPSSSYYSSASTSSEQNLKCKRPNKKPPPSSAEARRRNKFRGVRQRPWGRWAAEIRDPTRRKRLWLGTFDTAEEAATEYDRAAVKLKGPNAVTNFPLAPEATAQSPPLAADNLSSDGGASYSDLVASPTSVLAYECDSTPFDGFRYLDVDAFGFHIDAPLSLPEVNVNVALTCHHGKKQEEAFDEFDLDEFMTWPY

SEQ ID NO: 30343 - protein, 150 aa, Glycine max
  Clone ID: TF_17153962.pep
TSSVSHGSGSVVEAEVSVSYRGVRRRPWGKFAAEIRDSTRNGVRVWLGTFDTAEAAALAYDQAALVMRGSMAVLNFPAEIVRQSLRNMEQYGSFQEGSSPVLELKKRHSMKRKSETKKHQLHDVMVLEDLGAEYLEHLLTLSQDMDMDAC

SEQ ID NO: 30344 - protein, 428 aa, Glycine max
  Clone ID: TF_GmC6617_1.pep
IIPFFLSLSLTHPHDVKSCYFLFIPIISPDHVLTALFLLYRFNNSSGFSLPLTLLFPNHSPIWVHFVLHLNKKRNLEDSILCKHTVHSTVTKKLISPKKSSQTNSSTERTIVRISYTDPDATDSSSDEEGFPLVRQRMKRYVNQIEIETAFAEKVVRKRPAGEPCRRPAKLHSGKKFRGVRQRPWGKWAAEIRDPARRVRLWLGTYDTAEEAAMVYDNAAIRLRGPDALTNFVTPPQRDSPSPSPPPAAAETPAEVCDMKVVVTEEASGSGYDSSEDHCHHNLSSPTSVLQFRSNSSEENSESQQKAEQVLRECEGETETSLFEETGEFLALDNMPLPAWDDVFNFETPEYPPLLFQEEENLNLLHQSQMLGETVQFSSEEGFSDESSIMLADSLIDFDRACPSPSSLCQVDDFFQDILFASDPLVLL

SEQ ID NO: 30345 - protein, 119 aa, Glycine max
  unsure (1)..(119): unsure at all Xaa locations
  Clone ID: TF_jC-gmro02910014e07a1.pep
MKPYTSSPSSSKSKKKPTTTQQDHETAWGGRYLGVRRRPWGRYAAEIRDPSTKERHWLGTFDTAEEAALAYDKAARSMRXSRARTNFIYPDTPPGSSVTSILSPDEQXPNPNPPGPRRA

SEQ ID NO: 30346 - protein, 237 aa, Glycine max
  Clone ID: TF_GmC250_1.pep
AIGFSRGASVYRGVTRHHQHGRWQARIGRVAGNKDLYLGTFSTQEEAAEAYDIAAIKFRGTSAVTNFDISRYDVKRICSSSTLIAGDLAKRSPKESPAPVPASDFNSCGSSPMPLVSQPPPLAITDGEHSDELSNMMWNANNSDEQAQNESGGAEFNNNVTESSSSQQVSPSSNKDALNPQSPNEFGVSGADYGHGYFTLDGPKYDDGNNENDHMSTNRLGNLGLVNQVPMFALWNE

SEQ ID NO: 30347 - protein, 116 aa, Glycine max
  Clone ID: TF_GmC152_5.pep
QAYDDAAIRIRGDKAKLNFPATTISAAAAVPPPSKKQRCLSPDIITEESSSSSHSTTGSTGESGGGNDELDLKQIEWFLGLENELPVSNNIGAEWDNMDDLWMLDDVVVPNRHLIY

SEQ ID NO: 30348 - protein, 386 aa, Glycine max
  Clone ID: TF_GmC1286_1.pep
MKQAAALGGVQRARKRFVGVRQRPSGRWVAEIKDTIQKIRVWLGTFDTAEEAARAYDEAACLLRGTNTRTNFWPCSQSSTSPALSSKITNLLLQRLKERNNNNTCSSSSSSSTSLLINHQQMHQQVGAYGEGSTQFSIDQFTDFLNDPEDYSTSNNDFINNSAQIDYITSSFESCLTEKDGGTKIDMQYKSRNVTPQTSSNDSNSGVEDSEEEGSDLGVQSTNLDVHDFKFLDNIAPPSYYSPFEMAEEMEEEPVEPENENYGDEPSMLRAVMKRMTYERKFSASLYAFNGIPECLKLKLESGNMKGRGLADQLTSLQMACSKNILEKNKEEKEYIGTMDRRQEEEHQQTSPDMDSSSVDGELLLWNSLDLPPICFVNLLENGSFN

SEQ ID NO: 30349 - protein, 136 aa, Glycine max
  unsure (1)..(136): unsure at all Xaa locations
  Clone ID: TF_jC-gmXLIB3563P052af02a3.pep
THRHNRPSCTPAHIGAQWTLCPLNRSKECQGTAKKHPVYHGVRKKNWGQGXSEIREPXKKARIWLGTLSTPKMAVRAHDEAALTIKGQTTILNFPKTAHQIPRPVTCSPRDIQTAHTAVASMVKIDTVTQYSDSET

SEQ ID NO: 30350 - protein, 215 aa, Glycine max
  Clone ID: TF_GmC104_2.pep
MSSSSSSFFPAHITTDQEFSLIVAALTNVVSGSTSSSSVPEFRFPHSSPPLSSASLMPPPPPSIHTCRECNIAGCLGCNFFPEEQRKKYRGVRQRPSGKWAAEIRDRHRSARVWLGTFETAEDAARAYDKASFELRGPRAKLNFPLVDESLTLQPEMAATEEQINNEDNLNQGMGMDSHEFWDRINEADFHPFMMMMDFTGDSSDSAATGYTLSS

SEQ ID NO: 30351 - protein, 205 aa, Glycine max
  Clone ID: TF_GmC5319_1.pep
MATTISCDFSSMESIQHYLLEPEHDSNALMNISNHEVCYSATYNAFPSPTFSLEGVVHDANDSLACKREHPREEREVHAPPVWKHYRGVRRRTWGKFAAEIRDPKKNGARIWLGTYETEEAAGLAYDRAAFKMRGSKAKLNFPHLIGSHAPPQPVRVTKALKRNSPEKRKNLADLLNRLAKNRSQILIQVLEMGLHANYVNVEQW

SEQ ID NO: 30352 - protein, 222 aa, Glycine max
  Clone ID: TF_GmC15_1.pep
MAPRDHKTSNAKANGNGNSGVKEVHFRGVRKRPWGRYAAEIRDPGKKSRVWLGTFDTAEEAARAYDAAAREFRGPKAKTNFPLPLENVKNSSPSQSSTVESSSRDRDVAADSSPLDLNLAPAAVASARFPFQHQFPVFTGAVPAANQVLYFDAVLRAGMAGPRGFAFGYNHHPVAASEFHATTSDSDSSSVIDLNHNEGEVKGNGSRIFDLDLNHPPPHEIA

SEQ ID NO: 30353 - protein, 239 aa, Glycine max
  Clone ID: TF_GmC1684_1.pep
YGCEKTTEGYGCEKTTEGYGCEKTTEGYGCEKTTEGRTRGTENVKKEEGRRKYRGVRQRPPWGKWAAEIRDPFKAARVWLGTFDTAEAAARAYDEAALRFRGNKAKLNFPENVTLRQPQFTVSNPPSSLVSITTSIDPVVHSTRPLLLPSQASTATNVYEYFQLSGFPTNTNLYDGNRMFVTSNAMASHHLQSSSSLLSSSSSAFVSSVTSQDTSLSSLYSGQLPPWSKVSGHSSSSSG

SEQ ID NO: 30354 - protein, 156 aa, Glycine max
  Clone ID: TF_GmC392056_1.pep
MSSTTTDSDCSYLEQIQQYLLHNDSTILTPPQAFPSPSHDSSSDASVHFEHPSEAHDVNAPPKWRRYRGVRRRPWGKFAAEIRDPKKNGSRVWLGTYVNEEEAALAYDKAAFNMRGQKAKLNFPHLIGSGVQPEPPCLAVSRGAYQSLLPNTPYDS

SEQ ID NO: 30355 - protein, 351 aa, Glycine max
  Clone ID: TF_GmC326_6.pep
MDGGCVTDETTTSSDSLSVPPPSRVGSVASAVVDPDGCCVSGEAESRKLPSSKYKGVVPQPNGRWGAQIYEKHQRVWLGTFNEEDEAARAYDIAALRFRGPDAVTNFKPPAASDDAESEFLNSHSKFEIVDMLRKHTYDDELQQSTRGGRRRLDADTASSGVFDAKAREQLFEKTVTPSDVGKLNRLVIPKQHAEKHFPLSGSGDESSPCVAGASAAKGMLLNFEDVGGKVWRFRYSYWNSSQSYVLTKGWSRFVKEKNLRAGDAVQFFKSTGPDRQLYIDCKARSGEVNNNAGGLFVPIGPVVEPVQMVRLFGVNLLKLPVPGSDGVGKRKEMELFAFECCKKLKVIGAL

SEQ ID NO: 30356 - protein, 134 aa, Glycine max
  Clone ID: TF_10710623.pep
MVKSEHKIKTEPSSKAMRLSSPSSSTSDCKKKKYKGVRMRSWGSWVSEIRAPNQKTRIWLGSYSTPEAAARAYDAALLCLKGSSANLNFPLSSSQQYIPGDAVMSPKSIQRVAAAAAYSFIDNATTPPSPPSAS

SEQ ID NO: 30357 - protein, 312 aa, Glycine max
  Clone ID: TF_GmC1505_1.pep
MGTAIDMYNSSNIVADFLDPYSEELMKALKPFMKSDYFSASSSSSLESQPCSFSSNSLPTSYPSSNQIKLNQLTPDQIVQIQAQIHIQQQQQHVAQTQTHLGPKRVPMKHAGTAAKPTKLYRGVRQRHWGKWVAEIRLPKNRTRLWLGTFDTAEEAALAYDNAAFKLRGEFARLNFPHLRHHGAFVFGEFGDYKPLPSSVDSKLQAICESLAKQEEKPCCSVEDVKPVIHAAELAEVESDVAKSNAEYVYPEFEDFKVEHENPMFSGESSSPESSVTFLDFSDFSDSNNQWDEMENFGLEKFPSVEIDWEAI

SEQ ID NO: 30358 - protein, 97 aa, Glycine max
  unsure (1)..(97): unsure at all Xaa locations
  Clone ID: TF_LIB3242-559-P1-J1-G12.pep
LEGVYHTYFFVISKPHLLTSGGSLLVSAKKLTAEXTCIIIRGESAXLNVGINRTAKNLNNISKSXYIISCHNIQLGILTNASNAVGNRTIFVAYHHP

SEQ ID NO: 30359 - protein, 72 aa, Glycine max
  Clone ID: TF_LIB3242-501-P1-J1-E8.pep
VCKITSNIGFVSPMVKHLSGLGNRMQRSSLLNIVVIAHFEFTPMRYKYLALQPRYPKIFCQSQQNHRHKISS

SEQ ID NO: 30360 - protein, 359 aa, Glycine max
  Clone ID: TF_GmC340_2.pep
MAITATISVPFTSPSRRTLASVNSLSPRSTRSTLPTPQRTFKYPNSRLVVSSMSTETAVKTSSASFLNRKESGFLHFAKYHGLGNDFVLIDNRDSSEPKISAEKAVQLCDRNFGVGADGVIFVLPGISGTDYTMRIFNSDGSEPEMCGNGVRCFAKFVSQLENLHGRHSFTIHTGAGLIIPEVLEDGNVRVDMGEPILKASDVPTKLHANKDNAVVKSELVVDGVIWHVTCVSMGNPHCVTFSREGSQNLLVDELKLAEIGPKFEHHEVFPARTNTEFVQVLSNSHLKMCVWERGAGATLACGTGACATVVAAVLEGRAGRNCTVDLPGGPLQIEWREEDNHVYMTGSADVVYYGSLPL

SEQ ID NO: 30361 - protein, 110 aa, Glycine max
  unsure (1)..(110): unsure at all Xaa locations
  Clone ID: TF_11413657.pep
NDDDDKDRENNNVISFAKILTPSDANNGDDFSVPRFCADSCFPPLDFRTDLPVXLLSVADIHGVEWRFRHIYHGTPRHHFFTIGWSKFVNHKKLVDGDTVIXVKDSHDGM

SEQ ID NO: 30362 - protein, 488 aa, Glycine max
  unsure (1)..(488): unsure at all Xaa locations
  Clone ID: TF_GmC630_7.pep
XWDETSNIPRPERVSQWKIEPALAPLALNPLPMPRPKRPRSNVVPSSPDSSVLTREASKVSVDPLPTSGFQRVLQGQELSTLRGNFAESNESDTAEKSGVWPPATDDEKIDVSTSRRYGSDSWMSMGRHEPTYPDLLSGFGAHGDHSSHPSFVDQNGPVANLSRKHLLDREGKHNVLSPWPGVPSSLSLNLLDSNLKGSAQGGDTAYQVRGNLRYSSAFGEYPVLHGHKVEHSHRSFLMPPPPSTQYESPRSRELLSKPISGKPCEVSKLKDSDCKLFGISLLSSRPIASEPSLSQRNVTSESVGHMHTASHHQRAIENDQKSEHSRGSKPADGLLIDDHEKVLQTSQPHLKDVQAKSHSGSARSCTKVHKKGIALGRSVDLTKFSDYGELITELDQLFEFGGELTSPQKDWLIVYTDNEGDMMLVGDDPWQEFVAMVRKIYIYPKEEIQKMSPGTLSSKNEENQSASEGAADAQEIECQLNHSSSDT

SEQ ID NO: 30363 - protein, 113 aa, Glycine max
  Clone ID: TF_GmC140962_1.pep
MKAQPPDGAAAVAPNAGEGGEKKTINAELWQACAGPLLNLPSPGTHVVYFPQGHSEQVAASLKKDVDAQVPNYTNLPSKIPCLLHNVTLHADPDTDEVYAQMTLQPVPSFDTD

SEQ ID NO: 30364 - protein, 125 aa, Glycine max
  Clone ID: TF_GmC1198_4.pep
RLREDDRRARTSQFIVSVNKYLEAINQKCNVGMRFKMRFEGDESPENDKRFSGTILGVEDISPHWVNSNWRSLKVQWDEPASFPRPDRVSSWEIEHILACVPTTSSQPAVIKNKRPRQASEVPDL

SEQ ID NO: 30365 - protein, 127 aa, Glycine max
  Clone ID: TF_uC-gmflLIB3275P141f02b1.pep
TRVRHTVRCDLLNLKNQKGASLPPKWAPAGNQPQNIFCKTLTAGAPTPHGGFFWPCRPVEKGFPPWDFFKKPPVQKLIAGNLLWIEGKFKLIFRGQPKGHLLTTGWRVFVRAKKLVAGDSGLLIWNE

SEQ ID NO: 30366 - protein, 90 aa, Glycine max
  Clone ID: TF_701152936H1.pep
GCEKTTEGDEVYTQVTLLPQAELEGMYLEGKELEELGAEEEGDDRSPTKSTPHMFCKTLTASDTSTHGGFSVPRRAAEDCFPPLDYKQQR

SEQ ID NO: 30367 - protein, 164 aa, Glycine max
  Clone ID: TF_GmC229993_3.pep
GTEFSSGGWNNPLFGGGFLCGSESNLMSGGDHEMLVGRVAAESVVEAVTCAVNGRPFEVVYYPRASSPEFCVKASVVKAAMQIQWCSGMRFKMPFETEDSSRISWFMGTISSVQVADPILWPDSPWRLLQVHYTTIIINGVYFINVLTFPIRSSLPQLVFAQRQ

SEQ ID NO: 30368 - protein, 335 aa, Glycine max
  Clone ID: TF_GmC1322_1.pep
NSARVESLDCSYSVGMRFRMRFETEDAADRRFTGLIAGISDVDPVRWPGSKWRCLLVRWDDIEAARHNRVSPWEIEPSGSASNSSNLMAAGLKRNRIEMTSAKLEFPNPNGIQTSDFGESLRFRKVLQGQEILGVNTPPFDGINAQSPWLYELGRCYPGSNCSGIPPTGNNIRVPHPASDFSCNGIGFSESFRFQKVLQGQEILPSQPYGRALSIEEARANGRYGFYDGCQLLNSRNGWSAQMHDNASHLHASVTPAQVSSPSSVLMFQQAVNPVSNCDYNINKCNKEMEGRIHYQGLYTSEMKGRTLASSPFDDLIVSRRAPEGASSIGMFGCS

SEQ ID NO: 30369 - protein, 130 aa, Glycine max
  Clone ID: TF_GmC340_7.pep
MASAAPGATNDALYKELWHACAGPLVTLPREGERVYYFPQGHMEQLEASMNQGLEQQMPSFNLPSKILCKVVNVHLRAEPETDEVYAQITLLPEADQSEVTSPDDPLPESPRCSVHSFCKTLTACGTSTH

SEQ ID NO: 30370 - protein, 662 aa, Glycine max
  unsure (1)..(662): unsure at all Xaa locations
  Clone ID: TF_GmC340_1.pep
MASAAPGATNDALYKELWHACAGPLVTLPREGERVYYFPQGHMEQASMNQGLEQQMPSFNLPSKILCKVVNVHLRAEPETDEVYAQITLLPEADQSEVTSPDDPLPESPRCTVHSFCKTLTASDTSTHGGFSVLRRHALRTPPLDMTQXPPWQELVATDLYGNEWHFRHIFRGQXPRRHLLTTXWSVFVSYKKLVAVDAFIFLRGENGELRVGGRRLMRQHSNMPSSVISTHNMHLGALTTASPAKETGTVLSRFYKPRXAGLSLLVVASPVVEDACGNILAXSSGMRFKRRFEGGSRFRGTIAGVGXEVGMINRAFEWRSLKVEWDEPSSILRPVSISARDLEPPVTTPHKDSQPSQCNXKSGPLILPSTMPDSSLQGVWKSPVESAPFSYCDHQHGRDVYPSTNFNSTATGFLGFGGNCYASNKSIYWSSRMENSTESFSPVALKEFGEKRQGTGNGCRLFGIQLHDNSNANEENLPMVTLSGRVGDDGSVPSLDAESDQHSEPSNANRSDIPSVSCDAEKSCLQSPQESQSRQIRSCTKVHMQGMAVGRAVDLTRFDGYEDLLRKLEEMFDITGELCGSTKKWQVVYTDNEDDMMMVGDDPWLEFCSIVRKIFIYTAEEVRKLSPKIGLPISEEVKPSKMDSEAVANPEDQSSIVGPGC

SEQ ID NO: 30371 - protein, 191 aa, Glycine max
  Clone ID: TF_GmC630_4.pep
MATSEVSIKGNSVNGKGDNSSGGYTNDVRNGSGGGEARNSSSSSSSARDAEAALYRELWHACAGPLVTVPREGERVFYFPQGHIEQVEASTNQVAEQHMPVYDLPPKILCRVINVMLKAEPDTDEVFAQVTLLPEPNQDENAVEKEGPPAAPPRFHVHSFCKTLTASDTSTHGGFSVLRRHADECLPSLDM

SEQ ID NO: 30372 - protein, 154 aa, Glycine max
  unsure (1)..(154): unsure at all Xaa locations
  Clone ID: TF_GmC883036_1.pep
LSTKRLXAGDSVLFIXGIKRANRQQPALSSSVISSDSMHIGILAAAAHAASNNSPFTIFYNPRASPSEFVIPLAKYNKALFNQVSLGMRFRMMFETEESGVRRYMGTITGITDLDPVRWKNSQWRNPQVGWDESTARERPSRVSIWDIEPVVTW

SEQ ID NO: 30373 - protein, 187 aa, Glycine max
  unsure (1)..(187): unsure at all Xaa locations
  Clone ID: TF_GmC77382_1.pep
MRLSSADFSPPPQEGEKRVLDSELWHACAGPLVSLPAVGSRVVYFPQGHSEQVAVSTNKEVDAHIPNYPSLPPQLICQLHNMTMHADVETDEVYAQMTLQPLNPQEQNEAYLPAELGTASKQPTNYFCKTLTASDTSTHGGFSVPRRAAEKVFPPLDFSXQPPAQELIARDLHGNEWKFRHIFRGPA

SEQ ID NO: 30374 - protein, 76 aa, Glycine max
  Clone ID: TF_jC-gmro02910046c03d1.pep
LEDPFIFFIGQNGELSVGVRGALRQRGNVASSHLSSHSVRTGVPAPAWHAIWTGTIYTVYNKPRTSPAEFIEPYDQ

SEQ ID NO: 30375 - protein, 665 aa, Glycine max
  unsure (1)..(665): unsure at all Xaa locations
  Clone ID: TF_GmC1198_1.pep
TFSLNRGGGGEEDELYEQLWKACAGPHVEVPRTGQRVFYFPQGHMEQLEVSTKQKLNQRIPLFKWDSKILCRVVNVHLLAEQETDEVYAQICLEPVSXQAEPMSPDPCPAELPSPRVHSFCKVLTASDTSTHGGFSVLRKHATECLPALDMSKSTPTQELVAKDLQGYEWRFKHIFRGQPRRHLLTTGWSNFVTSKRLVAGDTFVFLRGNNGELRVGVRRIAPVQSSMPSSVISSQSMHLGVLATASHAVATQTLFVVYYKPRASQFIXSVWLGKFHASCNTLANCXLNIEILGTNXVQNYKRFSGTIVGVEDISPHWVNSNWRSLKVQWDEPASFPRPDRVLPWEIEPILASVPTTSSQTAAIKNKRPRQASELADLGDTALASPTFWDAGLTQSDMAKLSVMAEIKRSDSSSHMWHHNSKSSNNGISMNQTEAIWLSSPSQLYHDTTDDSKSISAWPISKPHSERLNNDHFLDQVDKEINKVEAATSYRLFGIDLIDHARNNSLSAENASGITSECKIDVNHVSDISKASKEWNQEQLQLSPKETQSKQVCSRSCTKVQMQGVAVGRAVDLTTLDGYDQLVDELEKMFDIKGQLQLRNKWEIVFTDDEGDMMLVGDDPWLEFCKMVRRIFIYSSQDVHKLSSGSKLPISSMEEIVTSLDTTET

SEQ ID NO: 30376 - protein, 818 aa, Glycine max
  Clone ID: TF_GmC695_1.pep
DEIYAQMTLQPLNSEREVFPISDFGLKHSKHPSEFFCKTLTASDTSTHGGFSVPRRAAEKLFPPLDYTIQPPTQELVVRDLHDNTWTFRHIYRGQPKRHLLTTGWSLFVGSKRLRAGDSVLFIRDEKSQLRVGVRRVNRQQTTLPSSVLSADSMHIGVLAAAAHAAANRSPFTIFYNPRACPSEFVIPLAKYRKSVFGTQVSVGMRFGMMFETEESGKRRYMGTIVGISDVDPLRWPGSKWRNIQVEWDEPGCGDKQNRVSVWEIETPESLFIFPSLTSGLKRPLPSGPLENEWGTLLTRPFIRVPENGTMELSNSIPNLYSEHMMKMLFKPQLINNNGAFLSAMQQESAATRGPLQEMKTTLAAENQMLLKNLHPQSIPDQPNALNMQSLLKNDQPEKFHPLAKIDNHLPSGIVIDKPKLECEVLPDRVIDYPSMEGCNNEKVAVNPVNQQGLATQLPFHNQNQSPLLPQSSPWPMQPLIESSMPHPQMIGMAQADSAMVNGLFPQLDIDEWLAYASSQPFAGQNRPTGPFSDLQEHNSLQPQVVNPPLPSMNNEVWDHYVKNFKFLSQADQLTSICQPGMYGLNGVPSSNNLRDLSAESNNQSEICVNVDASNSVGTTMVDPSTSSTILDEFCTMKDGEFQNPQDCMVGNLSSSQDVQSQITSASLAESHAYPLRDIPDNSGGTSSSHVDFDESSFLQNNSWQQVPAPIRTYTKVQKAGSVGRSIDVTTFKNYEELIRAIECMFGLDGLLNDTKGSGWKLVYVDYESDVLLVGDDPWEEFVGCVRCIRILSPSEVQQMSEEGMKLLNSGALQGMNV

SEQ ID NO: 30377 - protein, 55 aa, Glycine max
  Clone ID: TF_LIB4281-002-Q1-K1-F7.pep
RRIHLDTGPSDRDPRQRCPQLILWMFARQQPQCHSASWASFQLNTDNRGSFALCG

SEQ ID NO: 30378 - protein, 828 aa, Glycine max
  unsure (1)..(828): unsure at all Xaa locations
  Clone ID: TF_GmC630_1.pep
MASSEVTMKGNCLNHNDGGATEPHSPSTAKDAEAALFRELWHACAGPLVTVPREKERVFYFPQGHIEQVEASTNQVADQHMPVYDLPPKILCRVINVQLKAEPDTDEVFSQVTLFQEPNQDENAVEKEPPPAPPPRFHVHSFCKTLTASDTSTHGGFSVLRRHADECLPPLDMSKQPPTQELVAKDLHANEWRFKHIFRGQPRRHLLQSGWSVFVSSKRLVAGDAFIFLRXGENGELRVGVRRAMRQQGNVPSSVISSHSMHLGVLATAWHAILTGTIFTVYYKXPRTSPAEFIVPYDQYMESLKNNYSIGMRFKMRFEGEEAPEQRFTGTVVGIEDSDPKRWRDSKWRXFKVRWDETSNTPRPERVSPWKIEPALAPPALNPLSMPRPKRPRSNAVPSSPDSSVLTREASSKVSIDPSPANGFPRVLQGQEFSTLRGNFAESNEFDTAEKSVVWPPTAVDDEKMDVSTSRKYGSESWMSMGRNEPTYSDLLSGFGTSGDPSHLSLKDQMSPAYSARKQSLDHEGKLHMPYPWPVMPSSLSLNILDSNAKGPTHGGDTSFQARGNLRFSAFGEYPELHGHKVEDSHGNLMPPPPAPQTQYQSPCSRELMSKQVSAKTCEAVKPKDGDCKLFGFSLISGPIVPEPSLSQRNVSEPAGQMHLTAHQQRTSENDEKSDHSKGSRPVDDLVVDDHDRPLRTSQSHTKDVQAKPLSGSARSCTKVHKKGIALGRSVDLTKYSGYDELVAELDQLFEFGGVLVSTKKDWLIVYTDNDGDMMLVGDDPWHEFCAMDCKIYIYPKEEIPKMSPGTMSSKNEEKQSVMASDGARCKS

SEQ ID NO: 30379 - protein, 194 aa, Glycine max
  unsure (1)..(194): unsure at all Xaa locations
  Clone ID: TF_GmC896_4.pep
ARIPIPPLILCCVAAVKFLADPETDEVFARLRMVPLRNSELDYEDSDGNGGGXSEKPASFAKTLTQSDANNGGGFSVPRYCAETIFPRLDYSAEPPVQTVIARDVHGEVWKFRHIYRGTPRRHLLTTGWSSFVNQKKLVAGDSIVFLRAENGDLCVGIRRAKRGGVGGPKGPCGWSSYGSGGLVLEPYGAFSGL

SEQ ID NO: 30380 - protein, 71 aa, Glycine max
  Clone ID: TF_GmC240088_1.pep
MMASVEEKIKTGGVGGGMVVGGQTLVAEMKLLKEMQEHSGVRKTLNSELWHACAGPLVSLPQVGSLVVYFP

SEQ ID NO: 30381 - protein, 233 aa, Glycine max
  unsure (1)..(233): unsure at all Xaa locations
  Clone ID: TF_GmC216969_1.pep
MFMVMDSAERCLDSQLWHACAGAMVQMPPLNTKVFYFPQGHAEHAHGKVEYFGKNHQTRVPPLIPCRLSAMKYMADPDTDEVYVKMRLTPLREHELLDSQDDCFLGNTNSGGVENQEKPPTSFAKTLTQSDANNGGGFSVPRYCAETIFPRLDYSAEPPVQTIIAKDMHGQCWKFRHIYRGTPRRHLLTTGWSNIVNQTRLVAGDSIVFLRAENGDLXVGITRAKMGIDGGTE

SEQ ID NO: 30382 - protein, 709 aa, Glycine max
  Clone ID: TF_GmC1058_2.pep
MAGLIDLNNATEDDEMPSSGSSSTVCLELWHACAGPLISLPKKGSVVVYFPQGHLEQHLHDFPLPASANIPSHVFCRVLDVKLHAEEGSDEVHCQVVLVPETEQVHQKLREGEFDADGEEEDAEAVMKSTTPHMFCKTLTASDTSTHGGFSVPRRAAEDCFPPLDYSQQRPSQELVAKDLHGQEWRFRHIYRGQPRRHLLTTGWSAFVNKKKLVSGDAVLFLRGEDGELRLGIRRAAQLKSGSTFSALSGQQGSPTSLMDVVNALSARCAFSIHYNPRVSSSEFIIPIHRFVKSLDYSYSAGMRFRMRFETEDAAERRFTGLIVGIADVDPVRWPGSRWRCLMVRWDDLEATRHNRVSPWEIEPSGSASTANNLMSAGLKRTKIGLPSAKLDFPVSNAIGTSDFGESLRFQKVLQGQEMLGVNPTYDSFNAQSHQLSDLRRCYPGSNYPRIAATGNSIGIPQVSSNVSSNGIGFSESFRFQKVLQGQEILPSQPYGRALSVDEACGNGRCGLFDGFQAMRSRNGWSSHVSNNSSHLHPPVPSGQVSSPSSVFMFQQAVNPVSNSDYNNQIGQVMGGKVHQRVSYASEVKGGKFVSTPYEPLLRGLSQEGTNSFGLSNFHNQLDSSRSHDSVSVLRASQELVPSCKSRCRVFGFSLTEGAPVASKEATDSSAVACAGPSFTRHVEDDFHPGHSLRSKAVASYCTKGVLQY

SEQ ID NO: 30383 - protein, 698 aa, Glycine max
  Clone ID: TF_GmC340_3.pep
MASTLKSGGIHTGAINDDLYKELWHACAGPLVTLPREGERVYYFPQGHMEQLEASMYEGLEQQMPSFNLPSKILCKVVNVHLRAEPETDEVYAQITLLPEADQSEVTSPDDPLPESPRVKIHSFCKTLTASDTSTHGGFSVLRRHADDCLPPLDMSQQPPWQELVATDLHGNEWHFRHIFRGQPKRHLLTTGWSVFVSSKKLAAGDAFIFLRGENGELRVGVRRVMRQQSNVPSSVISSHSMHLGVLATASHAIATGTLFSVFYKPRTSRSEFIVSVNKYLEVQSHKLSVGMRFKMRFEGDEIPERRFSGTIVGVGDNKSSSVWPDSEWRSLKVQWDEPSSILRPDRVSSWELEPLVSTTLANSQPTQRNKRARPLILPSTMPDSSLQGGFAGLVVQNFFVILLPILFFYIIIFLCAPGIWKSSVESTSFSYCDPQQGRGLYPSPKFNSSATNFIGFSGNSSVGSPSNKSIYWSNRMENNLESISAIALKEAGEKRQGTGNGCRLFGIQLLENSNAEGNLQTVTLSGRVGDDRSVPSLDAESDQHSEPSNANRSDIPSVSCDAEKSCLQSPQESQSKQVHMQGMAVGRAVDLTRFDGYEDLLRKLEDMFNIKTELCGSLKKWQVVYTDNEDDMMMVGDDPWDEFCSVVRKIFIYTAEEVKKLSPKIRLPMNEKVNPSKQDSEAIVNPEDQSSNMGPSC

SEQ ID NO: 30384 - protein, 253 aa, Glycine max
  unsure (1)..(253): unsure at all Xaa locations
  Clone ID: TF_GmC245555_1.pep
DAWADAWAPPQLICQLHNVTMHADVETDEVYAQMTLQPFVRQEQKDTFLSMELGIPSKQPSNYFCKTLTASDTSTHGGFSVPRRAAEKVFPPLDFSQQPPAQELIARDLHDVEWKFRHIFRGQPKRHLLTTGWSIFVSAKRLVAGDSVLFIWNEKNQLLLGIRRANRPQTVMPSSVLSSDSMHXGLLAAAAHAAATNSXLPVFYNPRASPSEVXIPLSKYIKLVXYTYFLLGMRFRKLFETGEXSVRRYNGYN

SEQ ID NO: 30385 - protein, 690 aa, Glycine max
  Clone ID: TF_GmC630_2.pep
RVGYGKVLGITDSPPDECLPPLDMSKQPPTQELVAKDLHANEWRFRHIFRGQPRRHLLQSGWSVFVSSKRLVAGDAFIFLRGENGELRVGVRRAMRQQGNVPSSVISSHSMHLGVLATAWHAILTGTMFTVYYKPRTSPAEFIVPYDQYMESLKNNYTIGMRFKMRFEGEEAPEQRFTGTIVGIEDADTKRWPKSKWRSLKVRWDETSNIPRPERVSQWKIEPALAPLALNPLPMPRPKRPRSNVVPSSPDSSVLTREASKVSVDPLPTSGFQRVLQGQELSTLRGNFAESNESDTAEKSAVWPPVADDEKIDVSTSRRYGSDSWMSMGRHELTYPDLLSGFGTHGDHSSHPSFVDQNGPVANVGRKHLLDCEGKHNVLSPWSGVPSSLSLNLLDSNTKGSAQGGDTTYQVRGNLRYSSAFGEYPMLHGHKVEHSHRNFLMPPPPSTQYESPRSRELLSKPISGKPCEVSKLKDSDCKLFGISLLSSRPIASEPSLSQRNVTSESVGHMHTASHHQRAIENDQKSEHSRGSKPADGLLIDDHEKVLQTSQPHLKDVQAKSHSGSARSCTKVHKKGIALGRSVDLTKFSDYGELITELDQLFEFGGELTSPQKDWLIVYTDNEGDMMLVGDDPWQEFVAMVRKIYIYPKEEIQKMSPGTLSSKNEENQSASEGATDTQEIKCQLNNSASDT

SEQ ID NO: 30386 - protein, 231 aa, Glycine max
  Clone ID: TF_GmC144398_1.pep
MKLSSPGFSPPPQEGEKRVLDSELWHACAGPLVSLPAVGSRVVYFPQGHSEQVAVSTNREVDGHIPNYPSLPPQLICQLHNLTMHADTETDEVYAQMTLQPLNPQEQKGAYLPAELGTPSKQPTNYFCKILTASDTSTHGGFSVPRRAAEKVFPPLDFSQQPPCQELIARDLHGNEWKFRHIFRGQPKRHLLTTGWSVFVSAKRLVAGDSVLVIWNEKNQLLLGIRRANRP

SEQ ID NO: 30387 - protein, 136 aa, Glycine max
  Clone ID: TF_LIB4280-012-R1-K1-C7.pep
MPRQPPPSPPSQPGVLDPALWLVCAGTTVEIPTLHSRVYYFPQGHFDQASSAPRNLSPLLLSKPAVLCRVESVQFLADPLTDEVFAKLILHPVADCFASGPSAGAPAAASASAQTGENNVVSFSKGLTASDANNVG

SEQ ID NO: 30388 - protein, 453 aa, Glycine max
  Clone ID: TF_GmC1238_1.pep
LSTSASVSAGALLLRWGGFALLGLRAPRAPPPCHGPPEANSARQSYYPNFLSSVANAISAKSMFHVFYSPRASHADFAVPYQKYIKSIKNPVTIGTRFKMKFEMDESSERRLTFSDRTGMSDLDPYKWPKSKWRCLMVRWDEDIEISHQDRVSPWEIDPSSSLPPLSIQSSRRLKKLRPGLQAATPSHLTTGGSGFMDSEESVRSSKVLQGQENTGFMSLYYGCDKVTKQPEFEIRSPSHPNLASTGVRKISAAEFMRVHPSSFAGFSETNMFPRVLQGQEICPARSLTGKADLNFGSWGKPNVSYSNNNLHQATKPSFHSLGPEVIQTAYFPYGDIHNAGQGSSILCSKPTNFQRENIPFNTPSTQSGIMRNEVGRSDITIPNEQKLQDNISGTASLGANMRIPKDDNFKGQVKACKLFGISLSGETTAQNLQNSAKRSCTKVSDDSNRVIL

SEQ ID NO: 30389 - protein, 650 aa, Glycine max
  unsure (1)..(650): unsure at all Xaa locations
  Clone ID: TF_GmC695_2.pep
RSPFTIFYNPRACPSEFVIPLAKYRKSVFGTQVSVGMRFGMMFETEESGKRRYMGTIVGISDVDPLRWPGSKWRNIQVEWDEPGCGDKQNRVSVWEIETPESLFIFPSLTSGLKRPLPSGLLENEWGTLLRRPFIRVPENGTMELSNSIPNLYSEHMMRMLLKPQLINNNGAFLSAMQQESAATRGPLQEMKTTLAAENQMPLKNLHPHSIPDQPNALNMQSLLKNDQPEKLHPLGKIDNHLSSGIVIDKPKSESEVLPDHVIDYPSMEGCNIEKVAANPVNQQGLANQLPFHNQNQSPLLPQSSPWPMPPQIELSMPHPQMIDMVQADSAMVNGLFPQLDINEWMSYASSQPFAGQNRPTGPLSDLQEHTSLQPQVVNPPLPSMNNEVWDHYVKNLKFLSQADQLTSICQPGLXWLNGIPSSNNLRDLSAESNNQSEICVNVDASNSVGTTVVDPSTSSTILDEFCTMKDREFQNPQDCMVGNLSSSQDVQSQITSASLTESHAFPLRDIPDNSGGTSSSHVDFDESSFLQNNSWQQVPAPIRTYTKVQKAGSVGRSIDVTTFKNYEELIRAIECMFGLDGLLNDTKCSGWKLVYVDYESDVLLVGDDPWEEFVGCVRCIRILSPSEVQQMSEEGMKLLNSGALQGMNV

SEQ ID NO: 30390 - protein, 236 aa, Glycine max
  unsure (1)..(236): unsure at all Xaa locations
  Clone ID: TF_GmC240259_1.pep
PGILSAKVVAEAAELAARNMPFEVVYYPKERWSEFVVKTEAVNEAMKVAWSPGFXVKIAAETDDSSRVSWCQGTVSSVALHGNGQWRGSLWRMLQVTWDEPEGLQIAKWVSPWQVELVSTTPALHSAFPPIKRIKAAHDSGVFTNGERDPFPMTGFTNSTMGQLNQALLSYGTFPAGMQGARHDAFSASRFCNYPTDMSRLCMGNSFGKSTFPWLKTLETEVNVGSSQSDELSPDS

SEQ ID NO: 30391 - protein, 659 aa, Glycine max
  unsure (1)..(659): unsure at all Xaa locations
  Clone ID: TF_GmC127069_1.pep
MITFMDTKEKSKEVERCLDPQLWHACAGGMVQMPTVNSKVYYFPQGHAEHACGPVNFRTCPKVPPFVPCRVTAVKYRADPETDEVYAKLKLIPLNANDVDYDRDVVGGAETQDKPASFAKTLTQSDANNGGGFSVPRYCAETIFPRLDYSVDPPVQNILAKDVHGETWKFRHIYRGTPRRHLLTTGWSTFVNHKKLVAGDSIVFLRAENGDLCVGIRRAKKGICGGLETSSGWNPAGGNCHIPYGGFSPFLREDDNRILRNGNSNGLNPSVSMMGKGKVRPEAIIEAANLAANKKPFEVVYYPRASTPEFCVKASLVEAAMQTRWYSGIRFKMAFETEDSSRISWFMGTISSVQVADPLNWPNSPWRLLQVTWDEPDFPLDGQIPLPTLPNNLLGPNNTNQFGCLLESTPAESARARHAHYGLSLSDLHLSKLQSGLSSAGFPPLDHTATPMKVSNNKTLQKPSISENVSCLLSMTNSTRSSKKLDAGKTPSLMLFGQKILTEQQISPSSSVDTLSPVLTRNCSTDGNVNKVTNFFDGFGSALHQQGLHEHSSCEQVPXCKDNPQETEAGLEIGHCKVFMESEDVGRTMDLSLLPTYDEFHRKLADMFGIEKSEMLSRVLYCDSVGAIKHIGDEPFSDFTRTAKRLTILMDSGSNNVGV

SEQ ID NO: 30392 - protein, 150 aa, Glycine max
  Clone ID: TF_GmC137804_1.pep
AAESESSPLRNRRWTAHVPRVPAGNKTLWSSPAASEPYRRRTRATAADPNSCLFPSLRRHRHEPKLMMIQLNSVLMLMFYVLCFSFSLSLSLSECKIKKVELSGVSYLPHKTSPEFFFGSQRKKKGKEGDNFFLLHTLSVIYKTKQLNNN

SEQ ID NO: 30393 - protein, 113 aa, Glycine max
  Clone ID: TF_GmC5800_2.pep
MGLIDLNTTEDDEAAPLSASSPASYSSSSSHSGISTSASTLVVPPTPPSVCLELWHACAGPLISLPKKGSVVVYLPQGHFEHVQDFPVTAYDIPPHVFCRVLDVKLHAEEGSD

SEQ ID NO: 30394 - protein, 246 aa, Glycine max
  Clone ID: TF_GmC1198_2.pep
MLSRGAHGEVVGSGESGEDEMYEQQWKACAGPLVDVPRVGQRVFYFPQGHMEQLEASTNQELNQRIPLLKLPTKILCRVVNVHLLAEQETDEVYAQITLVPESSQDEPTNADPCTAEPPRAPVHSFSKVLTASDTSTHGGFSVLRKHATECLPVLDMSQPTPTQELVAKDLHGYEWRFKHIFRGQPRRHLLTTGWSTFVTSKRLVAGDTFVFSAWPISKPHSERLNNDHFLDQRMHLESPLSAKLM

SEQ ID NO: 30395 - protein, 134 aa, Glycine max
  unsure (1)..(134): unsure at all Xaa locations
  Clone ID: TF_jC-gmst024114e07a1.pep
ARVLTTGVIACVNKTKLVAGDAAMLLRGNHGELRLGIRWAAHLXKSWFVXGPSGQELNTATLKGVGNALSTRGAFSVRYNHRMSSAQVIIPVHRFLKSLDCSYSAGMRFMTHVETEDSXEPRCTGLIAGISDVD

SEQ ID NO: 30396 - protein, 175 aa, Glycine max
  unsure (1)..(175): unsure at all Xaa locations
  Clone ID: TF_GmC74745_1.pep
MKLSTSGLGQQGHEGGEKKCLNSELWHACAGPLVSLPTAGTRVAYFPQGHSEQVAATTNREVDGHIPNYPSLPPQLICQLHNVTMHADVETDEVYAQMTLQPLTPQEQKDTFLPMELGVPSKQPSNYFCKTLTASDTSTHGGFSVPRRAAEKXVFPPLDFSQQPPAAELIARDLH

SEQ ID NO: 30397 - protein, 134 aa, Glycine max
  unsure (1)..(134): unsure at all Xaa locations
  Clone ID: TF_GmC293503_1.pep
MEIDLNDAVTSEAEKSASCNGECEKGAALSSPTCSSSGSSSTRVSSSYIELWHACAGPLTSLPKKGNVVVYFPQGHXEQAASFSPFSPMEMPTYDLQPQIFCRVVNIQLLANXENDEVYTQVTLLPPAELAGMY

SEQ ID NO: 30398 - protein, 203 aa, Glycine max
  unsure (1)..(203): unsure at all Xaa locations
  Clone ID: TF_GmC86745_2.pep
MKLSSSGFNPPAEEEGEKKCLNSELWHACAGPLVSLPLVGSRVVYFPQGHSEQVAASTNREVDAHIPNYPNLPPQLICQLHNVTMHADAETDEVYAQMTLQPLSPXQKEVYLLPAELGTPSKQPTNYFCKTLTASDTSTHGGFSVPRRAAEKVFPPLDYSQQPPAQELIARDLHDNEWKFRHIFRGQPKRHLLTTGWSVFVSA

SEQ ID NO: 30399 - protein, 76 aa, Glycine max
  unsure (1)..(76): unsure at all Xaa locations
  Clone ID: TF_6070067.pep
ELCDACADPVVAVPXEKERVYYFRQGHMXEGEASTNHVADDHSAGDERPHNEVCQMISYHMDAGHDTDDMYAEVSV

SEQ ID NO: 30400 - protein, 81 aa, Glycine max
  Clone ID: TF_jC-gmXLIB3563P078bd01a1.pep
MASAAPGATNDALYKELWHACAGPLVTLPREGERVYYFPQGHMEQLEASMNQGLEQQMPSFNLPSKILCKVVNVHLRAEPE

SEQ ID NO: 30401 - protein, 102 aa, Glycine max
  Clone ID: TF_uC-gmflLIB3275P163h04b1.pep
MLCFLGAINDDLYKELWHACAGPLVTLPREGERVYYFPQGHMEQLEASMYEGLEQQMPSFNLPSKILCKVVNVHLRAEPETDEVYAQITLLPEADHSEVTQP

SEQ ID NO: 30402 - protein, 333 aa, Glycine max
  Clone ID: TF_GmC5800_1.pep
MGLIDLNTTEDDEAAPLSASSSHSGISTSASTLVVSPPPSVCLELWHACAGPLISLPKRGSVVVYLPQGHFEHVQDFPVNAFDIPPHVFCRVLDVKLHAEEGSDEVYCQVLLVPESEQVEHSLREGEIVADGEEEDTGATVKSTTPHMFCKTLTASDTSTHGGFSVPRRAAEDCFPPLDYSQQRPSQELVAKDLHGLEWRFRHIYRGQPRRHLLTTGWSAFVNKKKLVSGDAVLFLRGNDGELRLGIRRAAQLKWAGSFAVPSGQQLNPATLMDVVNALSTRCAFSVCYNPRYFSLYSLVPSPGVIEGNLLMSVPVHSYYGVFSVCIRWGWGF

SEQ ID NO: 30403 - protein, 605 aa, Glycine max
  unsure (1)..(605): unsure at all Xaa locations
  Clone ID: TF_GmC769_1.pep
PXTVMPSSVLSSDSMHIGLLAAAAHAAATNXFTVCYNPHLNCFSFKYVKAFSXTIFSLIRLKMLFETEESSVRRYMGTITGISDLDSVRWPNSHWRSVKVGWDESTAGERQPRVSLWEIEPLTTFPMYPSLFPLRLKRPWHPGTSSLHDGRDEATNGLMWMRGGPVDQGLNSLNFQGAGMLPWMQQRLDPTLLGNDQNQQYQAMLAAGLQNLGSGYLMKQQMMNFQQPYHYLQQSGNSNSPLQLQQQQPIQQSVSSNMLQPQAHVLTENLSQHLLQKPHNNQEVQAQQQQHTYQDSLLIPSDQLHQRQHSGIPSPSYSKPDFLDSSMKFPASVSPGQNMLSSLCPEGSGSLLNLSRSGQSLLTEQLPQQQWTQKYAPVQVNAYGSTVSHAQYSGKDSVMVLPHCNSDAQNSTLFGVNIDSSGLLLPTTVPGYTTSSADTNSSTMPLAESGFQGSLYGCMQDSSELLQSAGHVDPENQTQTFVKVYKSGSVGRSLDISRFSSYHELREELAQMFGIEGKLEDPLRSGWQLVFVDRENDVLLLGDDPWESFVNNVWYIKILSPEDIQKMGDQAVESLALGSGQRLNGTGAESQDIVSGPPSIGSLEY

SEQ ID NO: 30404 - protein, 100 aa, Glycine max
  Clone ID: TF_LIB4281-036-R1-K1-A6.pep
MHSVIGNVRKVSGVTCWSSSTCSSSTSSSSALVSSSYLELWHACAGPLTSLPKKGNVVVYFPQGHLEQVASFSPFTPLEIPTYDLQPQIFCRAANVQLLA

SEQ ID NO: 30405 - protein, 105 aa, Glycine max
  unsure (1)..(105): unsure at all Xaa locations
  Clone ID: TF_LIB4164-060-R1-N1-B1.pep
YSEYRFKCLKKEKEKGKQKKNLEKTTVMKDKQILLWLNHSKLLKFWLFIFWKHISYASTVMNRSAQQRVALNGIQKTINTIIMVRNQXISNIKWQEPKSRKAKGN

SEQ ID NO: 30406 - protein, 143 aa, Glycine max
  Clone ID: TF_LIB4391-012-R1-K1-E9.pep
TNEDSFHHIAEFRPWIITNKHATECLPALDMSKSTPTQELVAKDLQGFEWRFKHIFRGQPRRHLLTTGWSTFVTSKRLVAGDTFVFLRGNNGELRVWSEGVLLLCRAACHHLVISSQSMPLGVLATASHGCSNSDSFLLIISQ

SEQ ID NO: 30407 - protein, 349 aa, Glycine max
  Clone ID: TF_GmC88076_1.pep
MKKKSSIKAELWHACAGPLVKLPPSGTHVIYFPQGHSEQVSASLNRDVHSQIPNYPNLPSKLLCLLHTLTLHADPQTDQVYAQITLQPLPSFDKDALLRSDLALESTKPPPDFFCKQLTASDTSTHGGFSVPRRAAEKIFPPLDYSMQPPAQELVARDLHDTVWKFRHIYRGQPKRHLLTTGWSLFVSGKRLFAGDSVLFIRDEKQQLLLGIRRANRQPTNISSSVLSSDSMHIGILAAAAHAAANNSPFTVFYNPRASPSEFVIPLAKYYKSVYSKQASLGMRFRMMFETEDSGTRRHMGTVTGISDLDPVQWKNSQWRNLQVGWDESTAGEKRNRVSIWEIEQLLHF

SEQ ID NO: 30408 - protein, 73 aa, Glycine max
  unsure (1)..(73): unsure at all Xaa locations
  Clone ID: TF_GmC86745_3.pep
MKLSSSGFNPPAEEEGEKXVXNSELWHACAGPLVSLPPLGSREVYFSQGHSEQGAASTTREIDAHXIPNYPNF

SEQ ID NO: 30409 - protein, 79 aa, Glycine max
  unsure (1)..(79): unsure at all Xaa locations
  Clone ID: TF_701099624H1.pep
VTDDVYAQITLVPESNLDDPMNPDPCTAVPPSAPVHSFIKXLTASDTSTHGGFSVLRQHAMECLPALDMSQPGPSLELV

SEQ ID NO: 30410 - protein, 988 aa, Glycine max
  unsure (1)..(988): unsure at all Xaa locations
  Clone ID: TF_GmC570_1.pep
ETDEVYAQMTLQPVNKYEKEAILASDMGLKQNRQPTEFFCKTLTASDTSTHGGFSVPRRAAEKIFPPLDYSMQPPAQELVAKDLHDNTWAFRHIYRGQPKRHLLTTGWSVFVSTKRLFAGDSVLFIRDEKQHLLLGIRRANRQQPALSSSVISSDSMHIGILAAAAHAAANNSPFTIFYNPRASPSEFVVPLAKYNKVTYTQVSLGMRFRMMFETEESGVRRYMGTITGINDLDPVRWKSSQWRNIQVGWDESTAGERPSRVSIWEIETVLTPFYIXRPRFLRKKIPRESGVLDGVMFQAPIMIRVGQTLANHVGLSIKITPIPPLFGKVELMNMHNKNQSTSAHLLVEHSINLIKPLPGEVPINSTNPLCSIQITXSFSGEFESRQLHSTDSNHATLKVACVMSXQLQQLQHQLHLKRQQQHRQHQHQLLGIEQQLQVHSLLDVAIYHLQQQREQHLPERQNLAWMCKLAPQLGQKAKXERQVINRMGKFTYNEVPQMSLDGDLGQVPDSNHSFVAVKPARDGTTTNPIQLNVSXNPTELQLQLQLQQKLQQQQQHQQRLLSTSTPLLLSQLLQQQNTHQQNQQLPQPLPPISQHQPQQLGNNAFSTEKLLNSNNLSSYLMQSQKVSMNHPQNTQKSLTITRAPSTLTEGDAPSCSTSPSTNNCQVTPPNLLKRNQQLPATLRGSLIVEPTSNLIQELHSKPDTQIKQEFLNVKGPDQLKYKGTITDQLEASSGTSYCLDPPGNVQQNLPLSNFCMEGDVQSHPRNSLPFDSNLDGLTPDTMLSRGYDSQKDLQNLLSNYGGAPRDIETELSTADISPQSFGVPNMPFKPGCSSDIGINDPGVLNNNNGLWANQTPRMRTYTKVQKRGSVGRCIDVTRYKGYDELRHDLARMFGIEGQLEDPLRTDWKLVYVDHENDILLVGDDPWDEFVSCVQSIKILSSAEVQQMSLDGDLGGNVPIPNQAYSGTDSGNAWRGQYEDNSAASFNR

SEQ ID NO: 30411 - protein, 619 aa, Glycine max
  unsure (1)..(619): unsure at all Xaa locations
  Clone ID: TF_GmC318_1.pep
AIPLAKYVKAVYHTRVSVGMRFRMLFETEESSVRRYMGTITGISDLDPVRWQNSHWRSVKVGWDESTAGDRQPRVSLWEIEPFTTFPMYPSPFPLRLKRPWLPGLHSFHGMKDDDFGPKSTLLWLRDPDRGLPSLKFLGIGINPWMQPRFDLTIXNMQTDMYQAAAVQDIRSFDPSSKQSASLLPFQQPQNFPNRTAALMQAQMLQQSQPQQIFGNTQENQHSPQSQAHLQQHLQHQHSFNSQHHHHHQQQQQRQQHQVVDNQQISSAVSTMSQFVSAPQPQSPPMQVISSMCQQQNFSDSNGNTVTTIVSPLHSILGSFPQDETSHLLNLPRTSSWIPVQNSSGWPSKRVAVDPLLSSGASQCVLPQVEQLGQPQSTMSQNAISLPPFPGRECSIDQEGSNDPQNHLLFGVNIEPSSLLMPNGMSSLKGVCGNNGSSTLPYQSSNYLNTTTRTDSSLNHGMTPNIGDSGFLQCLEEAGQGNPLNKTFVKVYKSGSFGRSLDITKFSSYHELRGELARMFGLEGELEDPVRSGWQLVFVDRENDVLLLGDGPWPEFVNSVWCIKILSPQEVQQMGNNGLELLNSFPIQRLSNGICDDYVSRQDPRNLGTGITTVGSLDY

SEQ ID NO: 30412 - protein, 132 aa, Glycine max
  Clone ID: TF_GmC630_6.pep
MATSEVSIKGNSVNGKGDNSSGDARNSGGEAQNASSSSSSARGNVVSSACAFFFLVSDAEAALYRELWHACAGPLVTVPRERERVFYFPQGHIEQVEASTNQVAEQHMPVYDLPPKILCRVINVMLKVVTNA

SEQ ID NO: 30413 - protein, 667 aa, Glycine max
  unsure (1)..(667): unsure at all Xaa locations
  Clone ID: TF_GmC340_4.pep
MASAAPGATNDALYKELWHACAGPLVTLPREGERVYYFPQGHMEQLEASMNQGLEQQMPSFNLPSKILCKVVNVHLRAEPETDEVYAQITLLPEADQSEVTSPDDPLPESPRCTVHSFCKTLTASDTSTHGGLSVLRRHAXIDCLPPLDMTQQPPWQELVATDLHGNEWHFRHIFRGQPKRHLLTTGWSVFVSSKKLVAGDAFIFLRGENGELRVGVRRLMRQQSNVPSSVISSHSMHLGVLATASHAIATGTLFSVFYKPRTSRSEFIVSVNKYLEARSHKLSVGMRFKMRFEGDEIPERRFSGTIVGVGDNKSSSVWADSEWRSLKVQWDEPSSILRPDRVSSWELEPLVSTPPTNPQPSQRNKRSRPPILPSTMPDSSLQGVWKSPVESAPFSYCDHQHGRDVYPSTNFNSTATGFLGFGGNCYASNKSIYWSSRMENSTESFSPVALKEFGEKRQGTANGCRLFRIQLHDNSNSNEESLPMVTLSGRMGDDGPLPSLDAESDQHSEPSNVNRSDIPSVSCDAEKSCLRSPQESQSRQIRSCTKVHMQGMAVGRAVDLTRFDGYEDLLRKLEEMFDITGELCGSTKKWQVVYTDNEDDMMMVGDDPWLEFCSIVRKIFIYTAEEVRKLSPKIGLPISEEVKPSKMDSEAVANPEDQSSIVGPGC

SEQ ID NO: 30414 - protein, 711 aa, Glycine max
  unsure (1)..(711): unsure at all Xaa locations
  Clone ID: TF_GmC715_1.pep
ACVLVSSLLTWFCFVAGLKDDDLYRELWKLCAGPLVDVPRNGDRVFYFPQGHMEQLQASTDQELNQEIPHFNLPAKIFCRVVNIQLLAEQDTDEVYACIALRPESDQTEPTNPDPNVVXPQNYIISKLEVXLTASDTSTHGGFSVLRKHATECLPELDMTQSTPTQELAAKDLHGFEWKFKHIYRGQPRRHLLTTGWSTFVASKRLVAGDAFVFLRGEHGQLRVGVRRLARQQSPMPSSVISSQSMHLGVLATASHAVMTRTMFLVYYKPRTSQFIVGLNKYLEAVNNKFSLSMRFKMRFEGDDSPERRFSGTIVGVGDVSAGWSNSQWRSLKVQWDEPATIPRPDRVSCWEIEPFVASTALNVTQPAVKGKRSRPADVLSSAASGFWYHGSSNELSQLGAAAEVQSKENQVVPCSLRQKDIINSNPINANNSSISTRVRMEGVWPSSPHLNATPNLFSDPNNNNSNNGVSARSLISGYPNVPSRSSDGPTCDGVEDGKKTENSLDCWLFGVNLTNNCSNVITTPSEREQRGPSSSVVLSGPKESIPAAACETERVQTPNYSLSNKGQKQIISEASPNQWQNKQATVLSMRTRTKVQMQGVAVGRAFDLTTLSGYDDLIDELEKLFEIRGELRSQDKWAVTFTDDENDMMLAGDDPWPEFCNMVKRIFICSREDLKKMKCCKLPASSSEVEEILLSPDSQNRDETQQSHMP

SEQ ID NO: 30415 - protein, 574 aa, Glycine max
  unsure (1)..(574): unsure at all Xaa locations
  Clone ID: TF_GmC769_2.pep
IILSVVQATYVLFFLYLCKSYLCTIFPLLLHKPPLFCRYMGTITGISDLDPVRWPNSHWRSVKVGWDESTAGERQPRVSLWEIEPLTTFPMYPSLFPLRLKRPWHPGTSSFHDGRDEATNGLMWLRGGPGDQALNSLNFQGSGLLPWMQQRMDPTLLANDHNQHYQAMFASGLQNLGSGDLMRQQIMNFQQPXNYLQQSGNPNPPLQLQQPQAIQQSVSSNNILQPQAQVMAENLSQHLLQKSHNNREDQTQQQQQQRHTYQDTVLLQSDQLHQRQHSGLPSPSYSKPDFLDSSMKFPASVSPGQNILGSLCPEGSGNLLNLSRSSQSMLTEQLPQQSWAPKFTPLQINAFGNSMQHVQYSGKDTAMVPPHCNPDSQNPILFGVNIDSSGLLLPTTVPRYTTASAEIDASAMPLGESGFQSPLYPCVQDSSELVQSAGQVDPQNQTRTFVKVYKSGSVGRSLDISRFSSYHELREELAQMFGIEGKLEDPLRSGWQLVFVDRENDVLLLGDDXPWESFVNNVWYIKILSPEDIHKMGEQALESLGPSPGQRLNSTGADSHEIVSGLPSIGSLEY

SEQ ID NO: 30416 - protein, 208 aa, Glycine max
  unsure (1)..(208): unsure at all Xaa locations
  Clone ID: TF_GmC88076_3.pep
MKTTQQPEAPQGDPCEEKKKSINPELWQACAGPLVNLPPSGTHVIYFPQGHSEQVAASLNKDPHSQIPNYPNLPSKLLCLLHNLTLLADPETDEVYAQITLQPVPSFDKDALLRSDLALKSSKPQPDFFCKQLTASDTSTHGXGFSVPRRAADKIFPPLDYSMQPPAQELVARDLHDTVWTFRQFYRGQPKRHLLTXGWSLFVSGKRL

SEQ ID NO: 30417 - protein, 601 aa, Glycine max
  Clone ID: TF_GmC339_1.pep
RLVPLTRNEGDFEDDAVGGINGSENKDKSPSFAKTLTQSDANNGGGFSVPRYCAETIFPRLDYSADPPVQNILAKDVHGETWKFRHIYRGTPRRHLLTTGWSSFVNHKKLVAGDSIVFLRAEKDDLRVGIRRAKRGIGIGGGPEAPAGWNSGGGIRPMPYGGFSAFLREEDSQLLRNGLSPNAKGKVRPEAVIEAATLAANMQPFEVVYYPRASAPEFCVKANLVRAALQVRWCPGMRFKMPFETEDSSRISWFMGTISSVNFADPRWPNSPWRLLQVTWDEPELLQNVKRVSPWLVEIVSNMPTIHLSHYSTQQKKPRFPQHPDFSFDGQISLPAFPSNFLGPSNPFGCLAESTPAGIQGARHANYGISLSNLHFNKLQSGLFQAGFPPLDHTASPVLRVSSNNAATMQKVGTGDNVSCLLSMSTATQPSKKVDDVKAPQLVLFGQTILTEQQISLNTSAKTDPTRNNSFDGNADKMCKFSDGFGYALHPQGSSLERLQWYKDQQKETMASLETGHCKVFMESEDIGRTMDLTMLGSYDELYRKLADMFGIEKSVVLSHMLYRDTTGAVKHIGDEAFSEFTKTARRLTILMDSNSDGRGI

SEQ ID NO: 30418 - protein, 99 aa, Glycine max
  Clone ID: TF_LIB3242-311-Q1-J1-H3.pep
MATSEVSIKGNSVNGKGDNSSGDARNSGGEAQNASSSSSSARDAEAALYRELWHACAGPLVTVPRERERVFYFPQGHIEQVEASTNQVAEQHMPVYDLP

SEQ ID NO: 30419 - protein, 701 aa, Glycine max
  Clone ID: TF_GmC896_1.pep
MKEGEKVLDPQLWHACAGGMVQMPQMNSKVFYFPQGHAEHAHTNIHLRLPPFILCNVEAVKFMANPETDEVFAKLSLLPLRNSELGADSDGAGGDDVAEPSCCEKPASFAKTLTQSDANNGGGFSVPRYCAETIFPRLDYTAEPPVQTVVAKDVHGETWRFRHIYRGTPRRHLLTTGWSSFVNQKKLVAGDSVVFLRAENGDLCVGIRRAKKGISEGSGSGSSSVWSSASGSGNGNCGIGPYGPFSFFLKEENKMLRNGCGGNLSGRVKVRAEDVVEAVTLAASNKPFEVVYYPRASTPEFCVKASSVGAAMRIQWCSGMRFKMAFETEDASRISWFMGTIASVQVVDPICWPNSPWRLLQVTWDEPDLLQNVKRVSPWLVELVSNIPLINFTPFSPPRKKLRPQHPDFPLDVQFPIPMFSGNQLGPNSPLCGFSDNAPAGIQGARHAQFGKSLSDLHLNNKLQLGMLPTNIHQLGVYNEISNGNMMTNHDKSKESLSCFLTMGKSTKSLEKSDDVKKHQFLLFGQPILTEQQISSCSGDVLSHRKRSVSDDKDKAKCLMDDSQSTLSQQFSPGKASSAEFSWQLGLDTGHCKVFLESEDVGRTLDLSLFGSYEDLYRRLAIMFGIERSEILNHVLYHDAAGAAKKTGEEPFSDFMKTAKRLTILTDSSSKNIKRAFITGTRNGEHGLDASNKTGPLSIFA

SEQ ID NO: 30420 - protein, 89 aa, Glycine max
  unsure (1)..(89): unsure at all Xaa locations
  Clone ID: TF_GmC82302_1.pep
MKAPSNGYLPNSGEGERKTINSELWHACAGPLVSLPPVGSLVVYFPQGHSEQVAASMQKEADFIPSYPYLXIQXICMLHNXAVHADPXT

SEQ ID NO: 30421 - protein, 134 aa, Glycine max
  Clone ID: TF_LIB4280-026-R1-K1-G4.pep
PRVRFCRVLDVKLHAEEGSDEVYCQVVLVPESEQVQQKLREGEFDADGEEEDAEAVMKSTTPHMFCKTLTASDTSTHGGFSVPRRAAEDCFPPLDYSQQRPSQELVAKDLHGQEWRFRHIYRGQSQRHLFTTRV

SEQ ID NO: 30422 - protein, 229 aa, Glycine max
  unsure (1)..(229): unsure at all Xaa locations
  Clone ID: TF_LIB4390-057-R1-K2-C10.pep
VKAVYXTRVSVGMRFRMLFETEESSVRRXGWDESTAGERQPRVSLWEIEPLTTFPMYPSPFPLRLRRPWPSGLPSLYGLKDGDMGIGSPFMWLQGGLGDQGMQSLNFQXXGVTPWMQPRLDASIPGLQPELYQAMASSAFQEIRTMDPSKSSQSLXQFQQTSNVPSAHASEVQXQYYHSLSLKHPSTNYQENQVPAQSQLLQQQLHRYHPYYDPRQQQQQLKNLPVQQQ

SEQ ID NO: 30423 - protein, 92 aa, Glycine max
  unsure (1)..(92): unsure at all Xaa locations
  Clone ID: TF_GmC86745_1.pep
CHESCLNCYLVFTSNCFIFSLSGQPKRHLLTTXWSVFVSAKRLVAGDSVLFIWNEKNQLLLGIRRANRPQTIMPSSVLSSDSMHIVFLICRH

SEQ ID NO: 30424 - protein, 491 aa, Glycine max
  Clone ID: TF_GmC591_1.pep
RFRHIYRGQPKRHLLTSGWSLFVNAKKLVAGDSCIFVRGESGELRVGIRRAAENLSNISQSSSLISGHSMQLGILTNASNAVGNRTMFLVYYRPWTNPFEFIVHLQTYLKSTLQDYPIGTRVQMQHEVEESLRRLAGTIIGNEDIDSIRWPGSAWRRLKVQWDAIVEDKMHPERVCPWWIEPLESAKEKKQVPALPTKKKGHALLNQRSLPGISGFGKNDVHQNSAGPSSQTRRADGDLQGQDYSGLSPPQPLQRAPSTDIIRPSKVPIRGSRFGKENRNQHPFLKQDPLHKSLGRSMSLTHEDLSITSSNLTSIGSESLGMPSTESRGENDAPFGQPGSSSTFKLFGVNLIDSSPEIPSVNFVDLNKTSSLPSSPPMGVAPGKTCKKCRCVNNRSCTKVLKLGNALGRAVDLARFNGYTELIAELDSMFDFQGTLISGGSGWHVTCLDDEGDMMQLGDYPWQDFLGVVQKMIICPKEGTDNLKPGSSANP

SEQ ID NO: 30425 - protein, 74 aa, Glycine max
  Clone ID: TF_uC-gmflminsoy056g07b1.pep
MITQPPDAAPAVAPNSGEGGEKKSINAELWQACAGPLLNLPSPGTHVVYFPQGHSEQVAASLKKDVDAQVPNYT

SEQ ID NO: 30426 - protein, 104 aa, Glycine max
  unsure (1)..(104): unsure at all Xaa locations
  Clone ID: TF_LIB4200-008-Q1-K1-G8.pep
MAHLGCCNLGGPGSSGTSLPEKGLKDDDLYRELWKLCAGPLVDVPRTGDRVFYFPQGHMEQLQASTDQELNQEIPHFNLPAKIFCRVVNIQLLAEXRTDEVYAC

SEQ ID NO: 30427 - protein, 256 aa, Glycine max
  unsure (1)..(256): unsure at all Xaa locations
  Clone ID: TF_GmC88076_2.pep
MCVLTTIIILVGAEKKKSINPELWQACAGPLVNLPPSGTHVIYFPQGHSEQVAASLNKDPHSQIPNYPNLPSKLLCLLHNLTLLADPETDEVYAQITLQPVPSFDKDALLRSDLALKSSKPQPDFFCKQLTASDTSTHGGFSVPRRAADKIFPPLDYSMQPPAQELVARDLHDTVWTFRHIYRGQPKRHLLTTGWSLFVSGKRLLAGDSVLFIRDEKQHLLLGIRRANRGTHHISSSVVSSDSMHIXXLAAAAHAA

SEQ ID NO: 30428 - protein, 712 aa, Glycine max
  Clone ID: TF_GmC1058_1.pep
MAGLIDLNNATEDDETPSSGSSSSSSSSTVCLELWHACAGPMISLPKKGSVVVYFPQGHLEQHLHDFPLPASANIPSHVFCRVLDVKLHAEEGSDEVYCQVVLVPESEQVQQKLREGEFDADGEEEDAEAVMKSTTPHMFCKTLTASDTSTHGGFSVPRRAAEDCFPPLDYSQQRPSQELVAKDLHGQEWRFRHIYRGQPRRHLLTTGWSAFVNKKKLVSGDAVLFLRGEDGELRLGIRRAAQLKSGSTFSALSGQQGSPTSLMDVVNALSARCAFSIHYNPRVSSSEFIIPIHRFVKSLDYSYSAGMRFRMRFETEDAAERRFTGLIVGIADVDPVRWPGSRWRCLMVRWDDLEATRHNRVSPWEIEPSGSASTANNLMSAGLKRTKIGLPSAKLDFPVSNVIGTSDFGESLRFQKVLQGQEMLGVNTTYDSFNAQSHQLSDLRRCYPGSNYPRIAATGNSIGISQVSSNVSNNGIGFSESFRFQKVLQGQEILPSQPYGRALSVDEACGNGRFGLFDGFQAMRSRNGWSSHVSNNSSHLHPPVPSGQVSSPSSVFMFQQAVNPVLNSDYNNQIGQVMGDKVHQRVSYASEVKGGKFVSTPYEPLLRGLSQEGTNSFGLSNFHNQLDSSRSHDSVSVLRASQELVPSCKSRCRVFGFSLTEGAPVASKEATDSSAVACAGPSFTRHVEDDFHPGHSLRSKAVASYCTKVLY

SEQ ID NO: 30429 - protein, 237 aa, Glycine max
  Clone ID: TF_GmC131_1.pep
YGCEKTTEGGPWRMLQVNWDEPEVLQNAKRVSPWQVELVSLPFALHTVYSPNKRLRSDQGSGLLSNREGDPFFPMTGFPNSTMEHMTGFPNSTVGHMDKSLLSYDTFPAGMQGARHDLFSPSSFSNFLNDKSYLYMGSGSFGNNPVQSLGTVTTELNMSSSQSDDLSPHSQSSFHSFAREFAGTRNCDTKVASGSILLFGKIIQPAESDLHDGDCMERDGSRGSNKLKTVEACYFSK

SEQ ID NO: 30430 - protein, 280 aa, Glycine max
  Clone ID: TF_GmC153313_1.pep
NPRASPSEFVIPLAKYVKAVYHTRVSVGMRFRMLFETEESSVRRYMGTITGISDLDPVRWPNSHWRSVKVGWDESTAGERQPRVSLWEIEPLTTFPMYPSPFPLRLRRPWPSGLPSLYGLKDGDMGIGSPFMWLQGGLGDQGMQSLNFQGLGVTPWMQPRLDASIPGLQPELYQAMASSAFQEIRTMDPSKSSQSLLQFQQTSNVPSAHASEVQRQVLPQSQPQNTLLHNYQENQVPAQSQLLQQQLHRYHPYSDPRQQQQQLKNLPVQQQLPNVISPLS

SEQ ID NO: 30431 - protein, 173 aa, Glycine max
  unsure (1)..(173): unsure at all Xaa locations
  Clone ID: TF_GmC231_12.pep
MIRHVDVTMDQVWGWLSCLQGLCQQKSEGVDRPQWSTFSDVNYSGSLSSTFGSKALATEGEKENLMTDYXLKGLEVCADTIVGNAMLRGISGGQRKRVTTWEMLVGLANAXFMDEISTGLDSSTTYQILNSLKQCVHILKGTTVISLNFNEISTGLDSSTTYYSLLHFNDMLV

SEQ ID NO: 30432 - protein, 70 aa, Glycine max
  unsure (1)..(70): unsure at all Xaa locations
  Clone ID: TF_GmC630_9.pep
MTSLEVTMKGNCLNHNDGGATEPHSPSTAKDAEAALFRELWHACAGPLVTVPRERERVFYXFPQGHTEQA

SEQ ID NO: 30433 - protein, 202 aa, Glycine max
  unsure (1)..(202): unsure at all Xaa locations
  Clone ID: TF_GmC896_2.pep
THSVFFVVVPMKEGEKVLDPQLWHACAGGMVQMPQVHSKVFYFPQGHAEHAHTTIDLRVPPFILCNVEAVKFMADPETDQVFAKLSLVPLRNSELGPDSDSAAGDDAAEPSSCEKPASFAKTLTQSDANNGGGFSVPRYCAETIFPRLDCTAEPPVQTVVAEDVHGETWRFRHIYRGTPRRHLLTTGGSSFXVNQKKLVAGG

SEQ ID NO: 30434 - protein, 292 aa, Glycine max
  Clone ID: TF_GmC519_1.pep
TVRMCATQATSRATSVILRQSMHLGVLALIPHAVATQTLFVVYYKPRTSQFIIGVNKYLEAMDKKFSVGMRFKMRFEGDDSAETDKRFSGTIVGVEDISPHWVNSKWRSLKVQWDEPAAVPRPDRVSPWEIEPFVASASTPSVQPTMVKTKRPRPPSETPDVDTTSVASVFWDAGLQQADMAQKNTEGSWLSSPHSSCPSHLFQDVTDDSKIVSAWPVSKPHSSKLNNDHVLDQVDKESKVETATSYRLFGIDLIDPSRNSPSVEKASAQAVNVPKVTTEGCTITLSHSVIW

SEQ ID NO: 30435 - protein, 255 aa, Glycine max
  Clone ID: TF_GmC326_8.pep
DAVTNFKPLAGADDAEAEFLSTHSKSEIVDMLRKHTYDNELQQSTRGGRRRRDAETASSGAFDAKAREQLFEKTVTPSDVGKLNRLVIPKQHAEKHFPLSGSGGGALPCMAAAAGAKGMLLNFEDVGGKVWRFRYSYWNSSQSYVLTKGWSRFVKEKNLRAGDAVQFFKSTGLDRQLYIDCKARSGKVNNNAAGLFIPVGPVVEPVQMVRLFGVDLLKLPVPGSDGIGVGCDGKRKEMELFAFECSKKLKVIGAL

SEQ ID NO: 30436 - protein, 185 aa, Glycine max
  Clone ID: TF_GmC892011_1.pep
GAGTASAWALPGLVGFYPRAESPGVGVWSSAVRGAFWGRWCPGVWGGLPSATEDSSGTSWFMGTIASVQVLDPIRWPNSPWRLLQVSCLGPVLLQQPLRVSPWLRACGPTGPLALPAAFSPPRKKLRFPLDVQFPIPSFSGNPFGSSSSSSPFCCLSDNAPAGIQGARHSQIGISLSDLHLNNKL

SEQ ID NO: 30437 - protein, 273 aa, Glycine max
  Clone ID: TF_GmC229993_1.pep
FMGTISSVQVADPILWPDSPWRLLQVVWDEPDLLQNVKCVNPWLVELVSNMPTFNLSAYSPPRMKQRFLQDPYFQVINQLPMPSFSSNLLNYTNSLCTIQDSNSSGGIQGARHAQFGLSPSDFPFNKLPADMLLGGFSRLDHAAAQPIRPPCGTYKNNTTTKANVGISCLLTVGNPGQNFKESNETKAPHILLFGKLIQTEQKSSNTSSANTNGNSVSEGNSHKTSNASDGLGFGLHQGSPIENNSDGGFPWYKDQHKSDLGTDNVNTLCIAL

SEQ ID NO: 30438 - protein, 62 aa, Glycine max
  Clone ID: TF_GmC749534_1.pep
MAGVGDGDLYTQLWKLCAGPLVDVPRQGERVFYFPQGHMEQLQASTNQGLNQEIEWVVLKKK

SEQ ID NO: 30439 - protein, 116 aa, Glycine max
  unsure (1)..(116): unsure at all Xaa locations
  Clone ID: TF_jC-gmXLIB3564P118cd01b1.pep
AYSFSLAQYEEVVDNPQLFMFTLEKLHADMGTKXMIPIGGGRELYLHPLFDEVTSRGGIVKIIRERKWKDVPSVLNFPSTATDALIELRKYYAALLYHYEQIDFFKAREWDPTAPD

SEQ ID NO: 30440 - protein, 141 aa, Glycine max
  Clone ID: TF_LIB3242-287-Q1-J1-G12.pep
MTNYGDMNVTNKPNPDGSTNGFQSQLQVQQQNGWEQGSSRLRPTKPYPAPTARYQDIVRDANLFWGTLQAFHKILGTKYKVATVGGTSLDLHRLFVEVTSRGGIEKVIVDRKWKEVILTFNFKDTITSASFVVRKSYLSML

SEQ ID NO: 30441 - protein, 410 aa, Glycine max
  Clone ID: TF_GmC52418_1.pep
FEICMKLPQWALQILRQLAPEVSYRSLVALGIASIQGLPIASFEKDDAERLLFFYQNCEKDSCTNKNNIIFSSPPGWLKPPPPTRKRCEPRQEASPGLHEGVFAGQGGVCKLNEEEKDRKIVNGISMPLTPARQRLKVSAMRPIPHIRRHRMTPFCGPSETDGFDGTQVEAILPLVAPTKRTSIGSTSGTHRKSFSSAAQSKQVISLNPLPLKKHGCGRGPVQTCSEEEFLKDVMEFLILRGHNRLIPQGGLTEFPDAILNGKRLDLYNLYKEVVTRGGFHVGNGINWKGQIFSKMRNYTTTNRMTGVGNTLKRHYETYLLEYELAHDDVDGECCLLCHSSAAGDWVNCGICGEWAHFGCDRRQGLGAFKDYAKTDGLEYICPHCSVTNFKKKQNFANGYSQGLMSSRPL

SEQ ID NO: 30442 - protein, 371 aa, Glycine max
  Clone ID: TF_GmC1753_1.pep
MVFDICAQVLRQLAPNLAYRSLVMLGIASIQALPVASFSKDDAERLLFFCTRQEKENCPKDHVFSGIPSWLKPPPPSRKRSEPCSSSKSINASGRGVEAIGSHRQKFIVASMRPIPHSNRHKILPFSGLSEGTRYDGDHGKSNLPLALIKHNVSGPTSVTNRKSVSNSFQAHQIISLNPLPMKKHGCDRAPIRACSEEEFLRDVMQFLILRGHNRLIPPGGLAEFPDAILNAKRLDLFNLYREVVSRGGFHVGNGINWKGQVFSKMRNHTMTNRMTGVGNTLKRHYETYLLEYELSHDDVDGECCLMCHSSAAGDWVNCGICGEWAHFGCDRRQGLGAFKDYAKTDGLEYVCPRCSALKFSKKSQKTANGF

SEQ ID NO: 30443 - protein, 387 aa, Glycine max
  Clone ID: TF_GmC327_2.pep
MALEVKPEACGMADSKACDNGDPVLASHNEPATPLPAPADTNTEIMNVLEVENKVDEKQVAEPADNGNSNSKHMLFLDADHSYDGNESGTEEEQSAFMKELENFFRERSMEFKPPKFYGEGLNCLKLWRAVTRLGGYDKVTSCKLWRQVGESFKPPKTCTTVSWTFRGFYEKALLDYERHKIKGGELNVPVASHPEPINIENQASVSGRARRDAAARAMQGWHSQRLLGNGEVSDPIIKDRNSVSVQKREKQLKSINIHKRKKPSSPYMDNAVKAARSKPSKPQLDTTVIDIGPPADWVKVNVQKTKDCFEVYALVPGLLREEVRVQSDPAGRLVISGEPEHPNNPWGVTPFKKVVSLPSRIDPHQTSAVVTLHGQLFVRVPFEHLE

SEQ ID NO: 30444 - protein, 434 aa, Glycine max
  Clone ID: TF_GmC327_1.pep
MDNAQVLNKTKEGEYVSDVKSKAEETPQCDKRIENDANVWQINMDTAETTVAVNPKAFEVADSKTCLNGDSNSICPSHNEPNTPHAIPTEINSGLDNENRDNEKQAVVAHADNGHSISKNLYFLDPDDSYNGNESGTEEEQSAFMKELENFFRERSMEFKPPKFYKEELNCLKLWRSVHRLGGYDKVTSYKFWRQVGESFKPPKTCTTVSWTFRVFYEKALLDYERHKIKGGELNVPVASHPEPINIENQASVSGRARRDAAARAMQGWHSQRLLGNGEVSDPIIKDRNSVSVQKREKQLKSINIHKRKKPSSPYMDNAVKAARSKPSKPQLDTTVIDIGPPADWVKVNVQKTKDCFEVYALVPGLLREEVRVQSDPAGRLVISGEPEHSNNPWGVTPFKKVVSLPSRIDPHQTSAVVTLHGQLFVRVPFEHSE

SEQ ID NO: 30445 - protein, 208 aa, Glycine max
  unsure (1)..(208): unsure at all Xaa locations
  Clone ID: TF_GmC37930_1.pep
MEDGEKPSHGIADMDVVDATLQSHRVASDQVMVLQGHDIKNGDSDPAHVPATSAISNNQFELEDAKTVSHQELITPKPKEKNVREMKNVLNDTEMTDYDEYGTPLDRETFMKELETFYRERSLEFKPPKFYGEPLNCLKLWRAVIRLGGYDVVTGSKLWRQVGESFHPPKTCTTVSWTFRIFYEKALLEYEKHKREIGELQXPVGPFH

SEQ ID NO: 30446 - protein, 322 aa, Glycine max
  unsure (1)..(322): unsure at all Xaa locations
  Clone ID: TF_GmC85_1.pep
MSSAARTPGGEEGKHYPAPLAPHEGVVKDSTLFWDTLRRFHFVMGTKFMIPVIGGKELDLHVLYVEVTRRSGYEKVVAEKKWREVGSVFKFAATTTSASFVLRKHYFSLLYHYEQVHFFKARGPIYTPSADAFSGNSPSWRPELAIVEYSPKPMDNSPESRAEDTSCLSGNGTIEGKFDCGYLVSVKLGSEVLRGVLYHPEQXGSSPSIPNMRVPXVPINRKPHRSGRRKKNKRRWDPNYPKPNRSGYNFFFAEKHYTLKTLYPNREREFTKMIGQSWNSLSPEERMVYQNIGLRDKERYKRELTEYKEKMKLRQTSEVGRP

SEQ ID NO: 30447 - protein, 419 aa, Glycine max
  Clone ID: TF_GmC1306_1.pep
MASTSCVGNTSLSMKDSASRYSAYPLPLAKYEKRMDNPQLFMSTLEKLHAAMGTKFMIPIVGGRELDLHRLFVEVSSRGGIAKIIRERKWKDVTSVFNFPSTATNASFVLRKYYVSLLYHYEQIYFFKAREWDPIAPDVSQNQSTLPVPPPKMQFQQPLSETQPAVFQLSNVNAAKLPEAMAASSAGSPVIGVIDGKFESGYLVTVTIGSEKLKGVLYQAPQNPVLTASHHSASANNNNASASLGVHRRRRRKKSEIKRRDPAHPKPNRSGYNFFFAEQHARLKLLHHGKDREISRMIGELWNKLKESEKTVYQEKAMKDKERYRVEMEDYREKLKMGPVISDAVPLQQRLPEPDTDMLDEAEGDSPQTPEESSSGGSDYEDYNKTAERGFDMDALPVIGMGAETSYLGSEEKLSKGGL

SEQ ID NO: 30448 - protein, 271 aa, Glycine max
  unsure (1)..(271): unsure at all Xaa locations
  Clone ID: TF_GmC327_3.pep
MEFKPPKFYKEELNCLKLWRSVHRLGGYDKVTSCKFWRQVGESFKPPKTCTTVSWTFRVFYEKALLDYEXHTTKGGELNVPITPLAEPINIENQSVQGSASSGRARRDAAARAMQGWHSQRLLSNGEFSDPIIKIYLNARNHRTPLMLSKWHTVNHXRPQLRHISDTSVVDIGPPADWVKINVQKTKDCFEVYALVPGLLREEVRVQSDPAGRLVISGEPEHSDNPWGVTPFKKVVSLPSRIDTQQTSAVVTLHGQLFVRVPFESNQNREG

SEQ ID NO: 30449 - protein, 302 aa, Glycine max
  Clone ID: TF_GmC1243_1.pep
MANRWWAGNVGMIREQELMENSNNNNNNNNATTTTPTNSSNSNTNANTNTNTTEEEVSRDNGEDQNQNLGSHEGSEPGSSGRRPRGRPAGSKNKPKPPIVITKESPNALRSHVLEIASGSDVAESIAAFANRRHRGVSVLSGSGIVANVTLRQPAAPAGVITLHGRFEILSLSGAFLPSPSPSGATGLTVYLAGGQGQVVGGNVAGSLVASGPVMVIAATFANATYERLPLEDDQGEEEMQVQQQQQQQQQQQQQQQQQQSQGLGEQVSMPMYNLPPNLLHNGQNMPHDVFWGAPPRPPPSF

SEQ ID NO: 30450 - protein, 120 aa, Glycine max
  Clone ID: TF_uC-gmflLIB3260P050e10a1.pep
KKNPPGGHFPNPPPPGGGGFFYLHGAPPGFPARKTGVVAHPPYVGVGPPFGPPGFSLYVSGPYFVGICEGVHLFPRKHLFPCFCPALIRPPIGKTGTPPGSGPEFPGGPPGAPPGPKFRK

SEQ ID NO: 30451 - protein, 244 aa, Glycine max
  unsure (1)..(244): unsure at all Xaa locations
  Clone ID: TF_GmC120058_1.pep
MAGLDLSTASPFVQSLHRPDFNQQHDSGEDAKQSAEDGPHHQGDVVGRRPRGRPAGSKNKPKPPVIITRESANTLRAHILEVANGCDVFESVASYARRRQRGICILSGSGTVTNVSLRQPASAGAVVTLHGRFEILSLTGSFLPPPAPPGATSLSIYLAGGQGQVVGGSVVGEFXAAGPVIVMAASFTNVAYEXRLPLEEEENRLRYLGVAGNNSNPFPDPSSGLPFFNLPMNVQLPCGCLGRE

SEQ ID NO: 30452 - protein, 586 aa, Glycine max
  Clone ID: TF_GmC873_1.pep
GPEFPARPRVRNEGNENPLEEFGTLEEHVPFHEEQHAMVHHQQGQAEEEDHQVPFCEEIQGDEEGGDGVGVDDEMSNVFLEWLKSNKDSVSANDLRNVKLKKATLESAARRLGGGKEAMKQLLKLILEWVQTSHLQNKRRKENNGSSISSVLQAQFQDPSGQNNNQNTQSGSFAPESNTCFNNQTPWLSSQTFATDQAPLMVPPQQFPQPMVGYVGDPYTSGAASNNISATHNHNNSNPYQPGAEQYHMLESAHSWPHSLFNVASNYSQSFGDNNGLNPHGGFGGGGYGNNQYPYQFFHGPGDRLMRLGPSATKEARKKRMARQRRFLSHHRHHSGNHQNQGSDPHARLGGDNCNTALAAPHHANPSANWMYWQAMIGGAAGPLAPVIPAEPPVVQPVVDRSAMQTQNCHQNRVASDRRQGWKPEKNLRFLLQKVLKQSDVGSLGRIVLPKKEAETHLPELEARDGISITMEDIGTSRVWNMRYRYWPNNKSRMYLLENTGDFVRANGLQEGDFIVIYSDVKCGKYMIRGVKVRQQGVKPETKKVGKSQKNQHGTGTNASTTACTAANNGTPSSPKTKAEKSSKLI

SEQ ID NO: 30453 - protein, 772 aa, Glycine max
  Clone ID: TF_GmC873_2.pep
NCHVHVKVLIGASGFGEDRISASLSSLLWVVTEPNPIGFGTMENEHTLAVAEREMWLNSDQDEFLGVNDASMFYADFPPLPDFPCMSSSSSSSSALPFPVKTMTCSTRTTTTTTTSSSSSSSSWAVLKSDAEEDAEKNHCNRYMHDQLDATLSSTASMEVSQQKNLDPGLGGPVGECMDDVMDTFGYMELLEANDFFDPASIFQNEDNENPLVDFGTLEQHVPLHDEQHEMLHHQQGRTEEVDHQVPVCEEIQGDEEGGDGVGVDDEMSNVFLEWLKSNKDSVSANDLRNVKLKKATIESAARRLGGGKEAMKQLLKLILEWVQTSHLQNKRRKENNGSSISSALQAQFPDPSVQNNQNTQSGSFSPESNACFNNQTPWLSPQTFATDQAPLMVPPQQFQQPMVGYVGDPYTSGAASNNITTSHNHNSNNPYQPGAEQYHMLESAHSWPHSQFNVACHYSQSFGDNNVIFPQGGFGGGYGNNQYPYQFFHGPGDTLMRLGPSATKEARKKRMARQRRFLSHHRHHNGNHQNSGSDPHARLGGGDNCTTGLAAPHHANPTANWMYWQAMTGGAAGPLAPPAEPPAVDRSALQTQNCHQSRVASDRRQGWKPEKNLRFLLQKVLKQSDVGSLGRIVLPKKEAETHLPELEARDGISITMEDIGTSRVWNMRYRYWPNNKSRMYLLENTGDFVRANGLQEGDFIVIYSDVKCGKYMIRGVKVRQQGVKPETKKVGKSQKNQHGTGTNASTTACTAANNGTPSSPKTKAEICSKLI

SEQ ID NO: 30454 - protein, 230 aa, Glycine max
  unsure (1)..(230): unsure at all Xaa locations
  Clone ID: TF_GmC283122_1.pep
MMMDQRQREKLLHKTEACAFVAGVVPELSLVTVPGNNTNNVNNNNNVVSHSQSNGSGRIQENNHHLGLVAAVTSAFGTVQRKKRMARQRRSTKPTSLMNHLNNHKHNKPRSLPSPSASSSYVPLSSATLQPAREIDQRRLRFLFQKELKNSDVSSLRRMILPKKAAEAFLSALESQEGIVISMDDIDGXHVWRFXYRAGLHIQRMYALENXGEFXNTHGLVWRFIMVTKI

SEQ ID NO: 30455 - protein, 514 aa, Glycine max
  unsure (1)..(514): unsure at all Xaa locations
  Clone ID: TF_GmC5693_1.pep
GSSLEANAGMVSQIRVARPPAEGRGRNQLLPRYWPRITDQELQQISGDSNSTIVPLFEKMLSASDAGRIGRLVLPKACAEAYFPPISQPEGLPLRIQDVKGKEWMFQFRFWPNNNSRMYVLEGVTPCIQSMQLQAGDTVTFSRMDPEGKLIMGFRKATNSTAVQLQKGCSETHLNALSKKWNSAGGDMSWHNIDMPESRKRDELPLPPVMVPEKKRTRNIGSKSKRLLIDSQDALELKLTWEEAQDLLRPPPTLHFLXPSFVALKNHFPRDLDKLLRLKKEFKYESLSARQRLALEHESSGLDALANAAILGDDASDSGRTPVVTTTKHPRHRPGCSCIVCIQPPSGKGKHKPTCTCNVCMTVKRRFKTLMMRKKKRQSEREAEIAQRNQLSWRTKDESEVDSTSRHLTPVDAAKGQLDLNCQPDREDVQAGPNSLSMTSLLEEANLPLETYLKRNGLSSLISEQQTNSASNVQAQTTNDSEVKHNEDCGTASVIHEQESSPEENSGQDKEQNN

SEQ ID NO: 30456 - protein, 544 aa, Glycine max
  unsure (1)..(544): unsure at all Xaa locations
  Clone ID: TF_GmC962_1.pep
SVGLKCLLLPLFEKVLRATVAGLIGRPVXPKPXPDAHFPLISQSEGVALRMQDVKGIEWTFEXRFWPYNKSRMYTLEGVTYVTSRAKEERGQIIKIEGSIHSSNAMLYSKCLKVASRVGHKVLDNGKKVRYLIKTGEIIDSSENWKKLKEATKKTEEAAAATTYNDGSKTYMXLHFNSNETHLELTYQEAQYLFRPSPVVKPQIITTEDQVFEEYEVTTVFVKRTIFSACSSGGKEQWAQCDDCSKWRKLPVDALLPPKWTCSENVWDSSRCSCSVPEELSSKELENLLKTNKDFKKRRIAESSKSIQEHEASGLDALASAAVLGENLVDTAESSAGATTKHPRHRPGCSCIVCIQPPSGKGRHKPTCTCNVCMTVKRRFKTLMLRKKKRQSEREADTAQKDQTLLKDEPDTNGAPRDDTSRLEKEVGLNKSQHQVGESSAGQIDLNSHPNREDMQVETTGLNMSSHLEPATNHTVGEFMNQNGLRNFNNEVQTGQNSSLHTPKSNGEGQRYFSDGRCFASIMWNQERKDEVHSQTNQSQNNLS

SEQ ID NO: 30457 - protein, 377 aa, Glycine max
  unsure (1)..(377): unsure at all Xaa locations
  Clone ID: TF_GmC5717_3.pep
MQNVIDSGGGCKGRDHIIALLICEDLMEEHLTPLAVTHLLQHTLRSLCIHENSQWVYAVFWRILPRNYPPPKWEGQGAYDRSRGNRRNWILVWEDGFCNFAASAAPEVNSGDCSTPPVYGNCEFQPYQGLQPELFFKMSHEIYNYGEGLIGKVAADHSHKWINKEPNDQEINFLSAWHNSADSHPRTWEAQFLSGIKTIALIAVMLXIRAVHKVIEPXHVVLLRKXFSYIESIPGVLLPHPSSSAYPYKIEGGGYGAPEQWHYQGGNNHHHLASPQQTELYDHHGHFNLPLKITPSMSSLEALLSKLPSVVPPTTTQQQPLLPSNSQQQQRRPLEFIMGMQKVAKEELEQEEVYRPIYIYVCVGGVIVAVQFLKKKP

SEQ ID NO: 30458 - protein, 119 aa, Glycine max
  Clone ID: TF_7796380.pep
QTTTTGGEQEILDDKEPMFEKPLTPSDVGKLNRLVIPKQHAEKYFPLSGDSGGSECKGLLLSFEDESGKCWRFRYSYWNSSQSYVLTKGWSRYVKDKRLDAGDVVLFERHRVDAQRLFI

SEQ ID NO: 30459 - protein, 149 aa, Glycine max
  Clone ID: TF_LIB4164-006-Q1-N1-B8.pep
QNCHQSRVASDRRQKEAETHLPELEARDGISITMEDIGTSRVWNMRYRYWPNNKSRMYLLENTGDFVRANGLQEGDFIVIYSDVKCGKYMIRGVKVRQQGVKPETKKVGKSQKNQHGTGTNASTTACTAANNGTPSSPKTKAEKSSKLI

SEQ ID NO: 30460 - protein, 185 aa, Glycine max
  Clone ID: TF_LIB4199-008-Q1-K1-F1.pep
QRPAGDTVTFSRMDPEGKLIMGFRKATNSTAVQETLPSNMPNGSHSSETSYSGVYENLPILSGYSGLLQSQKGCSETHLNALSKKWNSAGGDMNWHSIDMPESRKRDGLPLPPVMVPEKKRTRNIGSKSKRLLIDSQDALELKLTWEEAQDLLRPPPTVKPSIVMIEDHVFEEYEEPVFERGVYS

SEQ ID NO: 30461 - protein, 210 aa, Glycine max
  Clone ID: TF_GmC449061_1.pep
MNIVHQEHLVPAPESLTSAAGCGLLHQHQEAAGSNFIINNNHHHHQHHHHHTTKQLDFMDLSLGSSKDEGNLPGSSSSVYAHHHHAASASSSANGNNNNSSSSNLQQQQQQPAEKEHMFDKVVTPSDVGKLNRLVIPKQHAEKYFPLDSSANEKGLLLNFEDRNGKLWRFRYSYWNSSQSYVMTKCWSRFVEEKKLDAGDMVSFQRGVGE

SEQ ID NO: 30462 - protein, 71 aa, Glycine max
  Clone ID: TF_GmC928_1.pep
IWLHTIVNDLSFFHHFHFQGTWFFIHTSIFPCAGDFVRANGLQEGDFIVIYSDVKCGKYVRPFLIFHFSFS

SEQ ID NO: 30463 - protein, 646 aa, Glycine max
  Clone ID: TF_GmC5689_7.pep
VVAEEFLEICGMEGSIPTGFKWRSRREVVDWLTSTLSKQNLQGDRSVSAGHNLVPSHEATNDSVNEIIGLSAQITDDKDFPTSNSKLSNSDIVWSGVAWRCGKQLKHYPAFFRNGIKIAIQSFVFVMGKGENHYIAYVEDMYEDRRGQKKIKVRWFHHNQEVKGVVPVRNPHPREVFITPYSQVISSECVDGSATVLTREDFEKCMPFFSPTSRDRIHLCFRQFRSNKIKPFDLSKLRGYYAQPILSCLHLDSIQHPEFLAREDEELSAGDDVKVGVKRRRGDKGSPQSWISRQGVRKLSRNKQMMVYKTFQVANYARSERILLSRKQVECQPWSNHTYKVDDKIELLCQDSGIRGCWFRCTVVQVARKQLKVQYDDVQDEDGSGNLEEWIPSFKLARPDKLGMRHSGRPTIRPAPTYEEQELAVEVGSAVDAWWSDGWWEGVVTRIDNCGDDSVEVHFPGECLLMNVCKKDLRISRDWLGDSWINIKAKPEITKSIFTANNSFNTKLSVSPSIAKDVDSVGFANSCHGDPVSKKSNEPVVIKEENFVSCDGSDKEENFVSCDGSAEDGDCVQDNKPSSEKSTQADNIDTHINCDNEENCGDNDNDNNSNDGGGNKNDDDNGNKDMGVFGTSGPDQETVELMEVAV

SEQ ID NO: 30464 - protein, 166 aa, Glycine max
  Clone ID: TF_GmC1073_6.pep
FGSRARDRRFTQVATSEDEDEAPPPPPPPKQQSSVSAPEENRSKQQQRKRKRMKLQEEEEEEEEKEEEKKKKKRKIKDKQEERSNEEEEPPQEDAKPIGEPVRLSGKGRGRKKHYESFEYDGNQYMLEDPILFTPEDKDQKPYVAIIKDITQSLNGSMMVTGQWFY

SEQ ID NO: 30465 - protein, 105 aa, Glycine max
  Clone ID: TF_GmC44819_1.pep
MENHRRRTQVTTSDDEDEQEKEEVLKRSRPVEDAKPIGEPLKYSGKGKSKKWHYDSFEFNGIQYTIGDHVLFKPEEKGQKPYAGIINDITQGNNGNVVVTGQWFY

SEQ ID NO: 30466 - protein, 134 aa, Glycine max
  unsure (1)..(134): unsure at all Xaa locations
  Clone ID: TF_GmC986_3.pep
RWDRGVERKRRTRHMWKSPTRAHSSVTVDFSSSSSSSSSSSSSLKSSVDWFYKDGRKIIAGDCALFKPPKDRPPFIGISHRVTVGKENKWKXSVNWLXRPIEVRLVKDLLLESAPNKIFYSFHXEEIPATSLLH

SEQ ID NO: 30467 - protein, 216 aa, Glycine max
  Clone ID: TF_GmC126_2.pep
MAKTRPGRKDVDSYTIRGTSKIVRAGDCVLMRPSDTSKPPYVARVEKIEQDNRSNVKVRVRWYYRPEESIGGRRQFHGAKELFLSDHYDVQSAHTIEGKCVVHSFKNYTKLENVGAEDYYCRFEYKAATGAFTPDRVAVYCKCEMPYNPDDLMVQCEGCKDWYHPACMGMTIEEAKKLDHFVCSECSSDDDMKKPQATFFASLGADGKVEPKRRKR

SEQ ID NO: 30468 - protein, 193 aa, Glycine max
  Clone ID: TF_16996963.pep
FVTGLTNKMEERHHTKWLVKKKKVVPRSEPNLNPRAAVGPVVSKRKAMQATTTRLINRIWGEYYSNHLPEDAKEGIASELKDEDEVEEQEENEDDDNEETILLEGTPKAHSASKQTKKFSAETEIRWEGEPEGKTSSGYPVYKQAIIRGEVISVGRSVLVEVDETDEFPDIYYVEYMFESKIGRKMFHGRMMQ

SEQ ID NO: 30469 - protein, 216 aa, Glycine max
  Clone ID: TF_GmC126_1.pep
MAKTRPGRKDLDSYTIRGTNKIVRAGDCVLMRPSDTSKPPYVARVEKIEQDSRNNVKVRVRWYYRPEESIGGRRQFHGAKELFLSDHYDVQSAHTIEGKCIVHSFKNYTKLENVGAEDYYCRFEYKAATGAFTPDRVAVYCKCEMPYNPDDLMVQCEGCKDWYHPACVGMTIEEAKKLEHFVCSECSSDDDMKKPHATFSVSPGSDVKVEPKRRKR

SEQ ID NO: 30470 - protein, 218 aa, Glycine max
  Clone ID: TF_GmC237787_1.pep
MAKKRSASDATDDAQNDTVSLLPSQRKKPKHSAPNPDACFVGKPIPSAEARAKWPHRYPSEVKKKAPARSSEEVTSENSEVMLARCHYRQAKVDGVVYNLYDDAYVKAEDGKPDYIARIVEMFETVDKEQCFMAQWFYRAEDTVIKNHGDLVDKKRVFISDVKDVNPLDCIVSKVKIFKKNPSVDLASKKAKLPFCDYYYDMKYTVPYLTFSNLVNET

SEQ ID NO: 30471 - protein, 609 aa, Glycine max
  unsure (1)..(609): unsure at all Xaa locations
  Clone ID: TF_GmC1759_1.pep
AREKIEQGTHKSGRNVGLKAYVVCQVLEIVVKKEIKQAERKCTQVKIRKVIRPEDLSNERAYXTDIRDVYYSDETYIISVESIEGKCQVRKKNDIPECSALGGIFQNVFFCELLYDPATGSLKKLPANIKVKYSSGQTSDAAARKRKGKCIEGDGVSESTKEGKTLNDKRLATLDIFAGCGGLSEGLQQSGVSSTKWAIEYEEPAGDAFKANHPEALVFINNCNVILRAVMEKCGDTDDCISTSEAAELAAKLDEKEISSLPMPGQVDFINGGPPCQGFSGMNRFNQSSWSKVQCEMILAFLSFADYFRPRYFLLENVRNFVSFNKGQTFRLTLASLLEMGYQVRFGILEAGAFGVSQSRKRAFIWAASPEDVLPEWPEPVHVFSAPELKITLSENVQYAAVRSTANGAPLRAITVRDTIGDLPAVGNGASKGNMEYQNDPVSWFQKKIRGDMVVLTDHISKEMNELNLIRCQKIPKRPAXVSWRDLPEEKIKLSSGQVVDLIPWCLPNTAKRHNQWKGLFGRLDWQGNFPTSVTDPQPMGKVGMCFHPDQDRILTVRECARSQGFPDSYEFAGNIIHKHRQIGNAVPPPLASALGRKLKEAVDSKSST

SEQ ID NO: 30472 - protein, 216 aa, Glycine max
  Clone ID: TF_GmC1281_1.pep
MAKPKAPRRTLESYSVKHISKTIRAGDCILMRPSDLSKPSYVARIERIEADARGANVKIHVRWYYRPEESIGGRRQFHGSKEVFLSDHFDVQSADTIEAKCTVHSFKSYTKLDAVGNDDFFCRFEYNSSTGAFNPDRVAVYCKCEMPYNPDDLMVQCEGCTDWFHPACIDMTVEEAKRLDHFFCESCSAEGQKKLQNSHSASRHSDTKVDTKRRRR

SEQ ID NO: 30473 - protein, 189 aa, Glycine max
  Clone ID: TF_GmC1007_1.pep
MAEPMAVDSNPESGLDFESPFAWGKKRGMGGKKKDVQFYESFSFDGAEYAINDTVCLQSGIGGGEPHIGRLIKIWETRDKSRKVKVQWFFRPAEICKYLVGIEVKPNELFLACGGDGAKGFANVNPLEAIVGKCNVVCISKDVGNPQPSGEAKADYVYYRFFDVVQLKVVDQIDVKVAAGIEVKNVSNK

SEQ ID NO: 30474 - protein, 522 aa, Glycine max
  unsure (1)..(522): unsure at all Xaa locations
  Clone ID: TF_GmC1073_1.pep
MVNRRRLTRVATSDDEDEAPPRPQRTRKRMRLIEEDNDDDENEEEKQEEVPELPQPAEDAKPLGEPVRVSGKGRGRKRHYDSFEFDGIQYILEDPVLLVPEEKGQKPYVAIIKDITQSINGNVKVTGQWFYRPEEAEKKGGGNWQSCDTRELFYSFHRDDVPAEAVMHKCVVHFVPXHKQLPKRKDHPGFIVQKVYDTVERKLWRLTDKDYEDIKQQEIDELVQKTLKRMGELLDIEPEEPVADQEDLMKNKRILRKKSISPLDVSKEEETTRKGDQPLKPETPWSCINNASEHYRILVDFNALTGDTHRDKWLERLLQRIQFMFNSDDSKKRDKGLGNANSDEINNESKHRSSESATDCQDKVQKSSKSFNWPDVAVSAMVALEKASHDALSSDSMKYNQKLRQLAFNFQKNAVLARRLLSGELEPSKILNMTPNELKEGLVAEEKTKEPDETQHLQMTDARCSKCMDCKVGLREIIQAGNNERYQLECVSCGHSWYASRDEVSMPTIDASDPKGNIGTAP

SEQ ID NO: 30475 - protein, 102 aa, Glycine max
  unsure (1)..(102): unsure at all Xaa locations
  Clone ID: TF_GmC45167_1.pep
MVEAGEEEVIEFKWGTRKGLGGKKKDVQFYESFTYDGVEYSLFDSVFLYKEGEPEHYIGKILKIWENSDKSKKVKILWYFRPSEILNFLEGSETXENELFLA

SEQ ID NO: 30476 - protein, 202 aa, Glycine max
  Clone ID: TF_GmC189543_1.pep
MPSKRKTRSSASPAAAPPSKRASRSSASRVADSAPVKSEAEEVVAASSVVKEEAQASFTDVTDGNVSDGEGTNARFVGEPVPDEEARRRWPKRYQEKEKKQSAGPKSNRNDEDEEIQQARRHYTQAEVDGCMLYKLYDDAHVKAEEGEDNYICKIVEIFEAIDGALYFTAQWYYRAKDTVIKKLAYLIEPKRVFFSEVQDDN

SEQ ID NO: 30477 - protein, 216 aa, Glycine max
  Clone ID: TF_701150581_FLI.pep
MAKTRPGRKDVDSYTIRGTNKIVRAGDCVLMRPSDTSKPPYVARVEMIEQDNRNNVKVRVGWYYRPEESIGGRRQFHGAKELFLSDHYDVQSAHTIEGKCVVHSFKNYTKLENVGAEDYYCRFEYKAASGAFTPDRVAVYCKCEMPYNPDDLMVQCEGCKDWYHPACMGMTIEEAKKLDHFVCSECSSDDDMKKPQATFSASPGADGKVEPKRRKR

SEQ ID NO: 30478 - protein, 269 aa, Glycine max
  unsure (1)..(269): unsure at all Xaa locations
  Clone ID: TF_LIB4164-054-R1-K1-A4.pep
TRPGKGRGRKKHYESFEYDGNQYTLEDPILLTPEDKDQKPYVAIIKRMAVEQLELHXRYFGSGSPPFFLCRVWDITQSLNGSMMVTGQWFYRPEEAERKGGGSWQSCDTRELFYSFHRDDVPAESVMHKCVVHFVPIHKQLPNRKQHPGFIVQKVYDTVERKLWKLTDKDYEDNKQQEIDELVQKTLQRLGKLLDIEPEEPVADQEDLMKNKRILRKKSISPLDVSKEEETTRQGDQPLKPEXPWSCVNNASEHYRILVDFNALTGDTH

SEQ ID NO: 30479 - protein, 355 aa, Glycine max
  Clone ID: TF_GmC6253_2.pep
MGTTSCEKKSVVYVSWDEVFVSNDKGRREVHYLLKRRGGGSDLAVLGKEKSLLRHMSYRYAIRNAALFKPYLKLRSRREVVDWLDSIVSGRDFRWLDLKLNDSSSGDAVMVGKHGYEPEIGALKDNQLQKMHSCTKEFSWIGLPWTCKKRRKHYQAYKRNGFQISVHDFVFVLAEEDKRLVAYLEDLYEDSKGNKMVVVRWFHKIDEVGIALPHSFSDREVFFSLYLQDLSIECIDGLAFVLSPGHYEKFQNEARCTHLEPFICNHQFDNDDVKPFDITQIKGYWKQEILRYMYTQLDSKSSGSSRQSDDDLELDENHMTTVFIRPKKRLRLTKADDAKEAVDLVGLKTENVNNS

SEQ ID NO: 30480 - protein, 89 aa, Glycine max
  Clone ID: TF_LIB3242-256-Q1-J1-H5.pep
KTSYVTRIEWIEADARNTDVKIDVRWYYRPEESIGGHRQFHGSKEVFLSYHFDVQSADTVKARCTVHSFKSYTKLNAIRNDDFFYRFEY

SEQ ID NO: 30481 - protein, 138 aa, Glycine max
  unsure (1)..(138): unsure at all Xaa locations
  Clone ID: TF_uC-gmroLIB3258P128h04b1.pep
MVLQKRLEYGFNGYQTPAMLXASRSTRRRAKFQRAEDKQKCAFELLATVAGKLLQERENPTMSSDTSSEKDQSGFVKECQDANKPSKSVISDEGSCDKSGFSRLSSQTNNKNCGLKKIPHLAIDGDAGTASIVTSSTC

SEQ ID NO: 30482 - protein, 304 aa, Glycine max
  unsure (1)..(304): unsure at all Xaa locations
  Clone ID: TF_GmC34052_1.pep
YHFVIHFRYIEELSENESREHNPRXVNSNKTMGLGHVSPTSNVRPARNAFSEARTYGTRLDSLGGSDVQIPCVSRVRRSRPRKDIASLMKFHPTGMGEAEKLSNKLLEHSSDAGSDFSDKVLKSRMPAKFHQPSSSEPVKEQCPVICPIELRQELRPKRADPSSHTSDDNNIVTVPTAKGGMRRKHHRAWTLVEVIKLVEGVSRCGAGRWSEIKRLSFASYSYRTSVDLKDKWRNLLKASFALTPAPADEGINLRKHGTAPIPEKILLRVRELAEMNSQVPPNYSSSQLASGGGSVHGDRSGYL

SEQ ID NO: 30483 - protein, 251 aa, Glycine max
  Clone ID: TF_GmC3657_7.pep
WKTAPKLKDCELSDLGVPRYHKRKTCYGFERSQHNAIVKKRKFVDRVSGVTSDGGFSSESVSNSPQKGMDGDKPSSSAKLHVPKAKDSHVKFSIKSIRIPELYIEVPETSTVGSLKRTIVEAVMAILGGGAHVGVLLQGKKVRDDNRTLVQTGISCNENLDTLSFMLEPTSLQASPTVCVGDPSSQCETSQPTRSTEIPVLDSGITDTLHDSPLLTYPGNLIESNHESTSSLADTTLDKLTPDSRAIVVVP

SEQ ID NO: 30484 - protein, 131 aa, Glycine max
  Clone ID: TF_GmC3657_3.pep
IRLEVSQKTKRSEFVQRRTRRPFSVTEVEALVHAVEELGTGRWRDVKLRAFENADHRTYVDLKDKWKTLVHTATISPQQRRGEPVPQELLDRVLAAHAFWSQHQAKQHGKHQAGPGTLKITEASAERPCVC

SEQ ID NO: 30485 - protein, 147 aa, Glycine max
  unsure (1)..(147): unsure at all Xaa locations
  Clone ID: TF_GmC354_8.pep
MVLQKRLEYGFNGYQTPAMLXASRSTRRRAKFQRAEDKQKCAFELLATVAGKLLQERENPTMSSDTSSEKDQSGFVKECQDANKHCKSVISDEGRCDTGSSVVYQSNEPSALWFDIIQDVAIDGALKTMLLNASRRNRFKPRRGNCL

SEQ ID NO: 30486 - protein, 487 aa, Glycine max
  Clone ID: TF_GmC354_4.pep
MCSFEDPLDENPPALISLGGNAKLSGYNDRIPCSLLSKSRDNVPVVSRDDDENSYGCTHPINTKTKSFRLKTGIGDNRISKRLASNFQKVAEKTKDHTHSNNDGDWKRTYCSKRNCNKHQSSQMNIPFKKRKLFNYRSVSNSNGLIRSGGIYYSPENCMNQDGCGSPPGMHKDPGMPSLEACQHQTLRSRGSHVNLRIKSFRVPELFIEVPETATIGSLKRTVMDAVTAVLGGELHIGVFLQGKKVKDDSKTLLQTGISHQNELDALGFTLEPNSSQSLPIVCAAHSPGPKADITQPVIRYPSSPAVIHQRIQGNSDMLPEHQVTSLGSHFENDHDSAPSPVNASVEKGMKDSKELVTVPEMDEELAMVPVHQKSKRSEIVQRRIRRPFSVDEVEALVQAVEKLGTGRWRDVKVCAFDNAKHRTYVDLKDKWKTLVHTARISPQQRRGEPVPQELLDRVLVAHAYWSHQQTKPQHKHHPETETVFSF

SEQ ID NO: 30487 - protein, 563 aa, Glycine max
  unsure (1)..(563): unsure at all Xaa locations
  Clone ID: TF_GmC3657_1.pep
MVLKKRVDHGFDGLRVPVIPKAPRSARRRIAFKKAVEDGQVCAIELLASLAGQLLQESEGSASSNASEGNHHPPFSQGVIEQDIQDGVKPLKKEEIHQGSCVESTFKTEVASQNSSFKPLSHTKTGHVSVNNSSDCCEKAEADVKSEIFEWDNKFGNYSNRLVETREKFRVSTHGNIKNGFKWEQEAGSSCIRGSNLADKCSLEDHLELYVSPALIDSKSNIKSPFHRKFFPSASFSRYGNGIKLGFRDDDENFLRCKKFCTKPKAFRSPRRIAHRRIRNLMSSKYWKTAPKLKDSELSRSDLGVPRYHKRKTCYGFERSQHNAIVKKRKFVDRVSGVTSDGGFSSESVSNSPQKGMDGDKPSSSAKLHVPKAADSHVKFSIKSIRIPELYIEVPETSTFSLKRTIVEAVMAILGGGAHVGVLLQGKKVRDDNRTLVQTGISCNENLDTLSFMLEPTSLQASPTVCVGDPSSQCETSQPTRSTEIPVLDSGITDTLHDSPLLTYPGNLIESNHEPTSSLADTTLDKLTPDSRAXVVVPATTETLAVVPGKSALSLAFVNDLTQ

SEQ ID NO: 30488 - protein, 106 aa, Glycine max
  Clone ID: TF_jC-gmro02910008g09a1.pep
TVKFSIKSIRIPELYIEVPETSTVGSLKRTIVEAVMAILGGGAHVGVLLQGKKVRDDNRTLVQTGISCNENLDTLSFMLEPTSLQASPTVCVGDPSSQCETSQPTR

SEQ ID NO: 30489 - protein, 205 aa, Glycine max
  Clone ID: TF_GmC354_1.pep
MQGGMRSFLSHGNVIRNAVLQRVRMVNPLLQTIASSRFESVTPARIEEHGFESTTISDILNDKGKGADGSWLWCTTDDTVYDAVKSMTQNNVGALVVVKSDANKAIAGIITERDYLRKIIVQGRSSKSTKVGDIMTEENKLITVTPDTKVLQAMQLMTDKRIRHIPVIDEKGMFGMVSIGDVVRAVVREHRQEVERLNAFIQGGY

SEQ ID NO: 30490 - protein, 67 aa, Glycine max
  Clone ID: TF_GmC144846_1.pep
VGIRRTLQPMLRPLSSGLKIKPTNTPLSSCVELCLHQKNEHLFLVVCKKFVDERQSKNSHPETWAIV

SEQ ID NO: 30491 - protein, 684 aa, Glycine max
  Clone ID: TF_GmC354_6.pep
MVLQKRLEYGFNGYQAPAMPRASRSTRRRAKFRRAEDNQKCAFDLLATVAGKLLQERENPTMSSDTSLEKDQCGFVKECQDANKPSKSEISDEGSCDNSGFSRLSSQTNKKNCGLKEFTHLAIDGDVGIASIVTSSSCLERFIAEKMVDSNSHFKVENVTSKVNLDFSDYPKDSDFKLDGDTSKGKDELHKFEKVPIGSGIDMCNFEDPLDVNPPALISLGGNAKLSGYNDRIPCSLLSKSRDNVPVVSRDDDENSSGCTHPINTETKSFRPKTCIGKRMASNFQKVAEKTKNYALSNNDGDWKRTYLSKRNCNKHQSSQMNIPFKKRKLFNYRSVANSNGLIRRGGIYYSPENCMNQDGCDSPPGMHKDPGMSSLEACQHQTLRSIGSHVNLRIKSFRVPELFIEVPETATIGSLKRTVMDAVTAVLGGELHIGVFLQGKQVKDDSKTLLQTGISHHNELDALGFTLEPNSSQSLPIVCASHSPRPKADITEPVIRYPSSPAVIHQRIQGNSDMLPEHQVTSLGRHFESDHDSAPSPVNASVDKNMKDSKELVTVPEMDEELAMVPVHQKPKRSEIVQRRIRRPFSVDEVEALVQAVEKLGTGRWRDVKLCAFDNAKHRTYVDLKDKWKTLVHTARISPQQRRGEPVPQELLDRVLVAHAYWSQQQTKSQHKHHPETETVFSF

SEQ ID NO: 30492 - protein, 156 aa, Glycine max
  Clone ID: TF_GmC347_1.pep
MIKIESCAKGDLNIVSSLEDTSTNNNMSKCRALVAVPAINMEALAVVPFWRKSGNPDFAQRRIRRPFSVLEVEALVQAVEKLGTGRWRDVKQRAFDHAKHRTYVDLKDKWKTLVHTARISPQQRRGEPVPQELLDRVLAAHAYWSQHQCKHQLKPL

SEQ ID NO: 30493 - protein, 90 aa, Glycine max
  Clone ID: TF_GmC3657_8.pep
MVLKKRVDYGFNGFRVPVIPKAPRSARRRVAFNKAVEDGQVCAIELLASLAGQLLQESESSAFSNASEGNHQPAFSQGVIEQDIQDEVKP

SEQ ID NO: 30494 - protein, 46 aa, Glycine max
  unsure (1)..(46): unsure at all Xaa locations
  Clone ID: TF_8670002.pep
QDKWKTLLHTATLSSDQLMGXPLPQELLNMVLAAHAFWSYHQSNHH

SEQ ID NO: 30495 - protein, 370 aa, Glycine max
  Clone ID: TF_GmC57466_1.pep
VLWVDVFLICSNAMQYNSSDTIYHRQARAMQEIARKDFENLRQDSDDDSEPQPKIVQKGRPPGKHSRKSLGLGMPPSERVGPESSSDATLASGADIGSGSNGYKFRKVPSKFQPTDSSARAYNSTFNSGGYTGCSDWENEFPASVVKAVLRYGKKQFAVDETRRDTYKNPVTLGNERPMLSTVEDEFKQLLAVGVHMKHSYARSLAHFAANLGPVVWKIAASKIRGVLPAGHEFGPGWVSEDDGSSQRRHFPVCDEGRTSDPPVPEDYRSRFSSPSGSLPLANRPFYQSGDMAIDNYQNELNPVINIPGGSESITPMRIQQESMVHSDDFGSHDRLGSNFPSQMKMVRLADLTGTSSAGVVPQMFDMDPP

SEQ ID NO: 30496 - protein, 121 aa, Glycine max
  Clone ID: TF_GmC373325_1.pep
MDRCKKMQCWAMLKRLMVGRDAWALKKDILDPKVLCVLHKSEAIRKPKGLEDIESKLKNWDYSETDEFVDDVKLVLSYALQYPQRSEVHRTARRISEGFEISWKTMKAKWMRDEQDLQEKR

SEQ ID NO: 30497 - protein, 463 aa, Glycine max
  Clone ID: TF_GmC14843_1.pep
MGPNLVTEVPEGEDDRKFSSPQLLHSYSDKRSYDHFHKRDKSYKGKVNQDGFESFDCDMGEHTSVFSNQHGLGIGLSDVTSDPMRQTRFIRMKTTSEEPSTSNRRIKIRQGQSSRGKSDREDSSTRMSDQLHRRIRTARHRNGEYIANDSGTLTRRVSNHHVKKLSWLMLSEPEEGYRYIPQLGDEVVYLRQGHQEYIKSYSLSESGPWRSFTGLGASEICKVEELEYAELPGSGDSCCKLKLRFLDPSSCVHGKSFKLTLPELINFTDFVIEKTWYDTAMKRNWSSRDKCMVWWRNEDGKGGSWWDGRIIQVQAKSDDFPESPWERYRVQYKTDPTENHLHSPWELYDSEMLWEHPHIDHEIRDKLLSYFTKLDRRERFDIQALNQVAEKLEFANRFPAPFYPELIQSRLKNDYYRSVEGVNHDIMIMLSNAEEYFKITKNVQLVGKIRRISEWFRRKLERI

SEQ ID NO: 30498 - protein, 346 aa, Glycine max
  Clone ID: TF_GmC303_6.pep
RDLDRVEPSKLSQIPCKLIEKDMHKGNKGNHDVEQPAGSLKACSSVCFVTSKCRICGDTTCHCVIPSNSIQVSSDISSEGSEGGDVITRGADSLRQNCPTKCTSPIEKKSDPDSDGAVSSLDSEHVCPSSQHVTPTTDASSGEVWSTPVLPVQLSPKKALRAAMLKSRFADTILKAQQKTLLDHGDKGNPQKMQQEKERLERIQREERARIEAQIKIAEAAARMRAEEESRQRREKEREAARAAIEKMKRTVDIEHFLEIIKELESLSGCTLSYKAVGCRNGYKVALETLDKPQFENPLERLGLFIKEDFTADEDEEVLNGGFEEGEIFNCMKVYSVLPALTVYIL

SEQ ID NO: 30499 - protein, 531 aa, Glycine max
  Clone ID: TF_GmC11917_1.pep
MASAYRNEPNWPRHRSGGAGFMGKVPFSNPNPNPNSNPKLANGKKTQSASDDASSINRRSNDAATHSQYVTFNVASCTKKELNDFKNRLVSELEQIQKLRNQIGSSEFQPGQSLNGHPKKPLGKKISGNKRPLPSNSAKDLKRSHSEVGNLMKCCSQVLQKLIKHKHGWVFNAPVDVVGLKLTDYCDVIKQPMDLGTVKSNLSMNVYATPSDFASDVRLTFNNALAYNPKGHDVYTVAEQLLARFEELYRPVHEKFEGSIGHDRESEEELQASSWSQVEPERVKKKENPIPPAKLHKEPPPQHPASSSNPPLVQSPVRTPSPMRAPPVKPLKQPKPKAKDPNKRDMSLEEKHKLGLGLQSLPPEKMEQVVQIIRRRNGHLKQDGDEIELDIEAVDTETLWELDRLVTNYKKMVSKIKRQALMGNIDNNNNDVQSNKGNGELPSSEKVDGGPVEVKKPKKVEAGDEDIDIGDEMPTSMFPPVEIEKDKDVVGGHASSSSSSSGSSSSDSSSSSDSDSGSSSGSDSEADNGHS

SEQ ID NO: 30500 - protein, 273 aa, Glycine max
  Clone ID: TF_GmC801229_1.pep
MGKSRKYSKGHATGFVPDFRHAVETMGESEGLGNLGRVDNELTMSEISCAPKRKRVDESFDVPFQLLSLTKMARSGRKDLTLRLKSELEEVRKLQKKIAGMSSITTELSPYSDIRSCSVGEKRPPLESLALHGKKRPLLKHNGPKTKRSISGRFISAKSAAPVTPSYAVLMKQCETLLKRVMSHQFGKVFDKPVDIVKWNIPDYFTIIKHPMDLGTVKSKLISCEYTSLMDFAADVRLTFSNAMSYNPPGNDVHVMAETLSKYFETRWKAIEK

SEQ ID NO: 30501 - protein, 728 aa, Glycine max
  Clone ID: TF_GmC4550_1.pep
LPPRGHPSCVSAEAFAGRAPVRSSKQEQIHNSIVSTLLALMDGLDSRGQVVLIGATNRIDAIDGALRRPGRFDREFNFPLPGCEARGEILDIHTRKWKHPPPNELKKELAASCVGYCGADLKALCTEAAIRAFRQKYPQVYTSDDKFVIDVDSVKVEKTHFIEAMSTITPAAHRGAIVYSRPLSLVVQPCLQRHLEKAMCSISDIFPPASITSELTKLSMLSYGSAIPLVYRPRLLLCGGEGTGLDHLGPAVLHELEKFPVHSLGLPSLLSDPSAKTPEEALVHIFGESRRTTPSILYLPQFDVWWETAHEQLRAVLLTLLEELPSDLPILLLGTSSVALSEVEEVPTSIFPHRSVYEVNMPCAKDRTLFFNLLIEAAMSILLEGINKKSQDTGCLPELPKAPKLASGPKVSELKAKVEAEQHALRRLRMCLRDVCNRILYDKRFNAFHYPVTDEDAPNYRSIIQNPMDMATILQHVDNGDYITSAAFLQDINLIVSNAKAYNGEDYNGARIVSRACELRDAVHGMLSQMDPALVAYCEKIASQGGPVQLSDELGDSTFPATPVVQLGQSTRMSARLRHVQPEVNMNQSYEVLKRTKKIAEVHAEDKSQEDSVPPKSSQEHQANDTNSERLENVSIEGDLHGTFTNNLADGNSPDDVTMLDGEFSGEVESVKQLFVKRSENYSIPQLERLYTRVMKGVFETKNKGVNGDLKSSVLKFLLNFVEDDANF

SEQ ID NO: 30502 - protein, 264 aa, Glycine max
  unsure (1)..(264): unsure at all Xaa locations
  Clone ID: TF_GmC5690_1.pep
MRKRKSEPLVGVLELIKGHEHSSLFERRLDSQGDTDRYKDLVKQPMDLETIQLRPQKGHYSSCTSAFFRDLLLLFTNATVFFSHDSLESQAGRQLHRLATAEMKNHGQAQSDPIPRKNDSLPTNAPXAKPDSLLYKNKASGPILGWRKRSSMRRKPSSATFGQKGDQPVFNDKKERPSSDAKPPMKPSSSDTDEEELPKAKEKPVTGARSLRRSNKNLNSNSSNNNNKKPSSISTPKAGSSGNKPSETVKPEKRTFQEMISKAS

SEQ ID NO: 30503 - protein, 311 aa, Glycine max
  Clone ID: TF_GmC12104_8.pep
QFESDVFLICSNAMQYNAPETIYHKQARSIQELGRKKFEKLRIGFEHSQIELKSEQKAGSNYLVKKQPKKPLARASQEPVGSDFSSGATLATIADVQPTSHLMQGGRCERSGNLDGILEANAFWIDANQEKAEDVLLGKGLLSKWGRKSFALDESRRASYNMSNQPIVKPDSIFMTFERGMKHLVTVGLHAEYSYARSLARFSASLGPIAWKIASHRIQHALPAGCKFGRGWVGEYEPLSTPILMVNNRVQKENSLVMKLHSTTELPKGNQNCKNVESSIMHPVNGQMLEGKRPSMPDFKGKPLFQSHKQP

SEQ ID NO: 30504 - protein, 268 aa, Glycine max
  Clone ID: TF_GmC303_4.pep
MIATETIVPSTKLKIKFSTKRIEIDSGPKCEFGQKVYHNDKNRRCNSNENSSALNSNKRGPPVSVEGQKEKRQKIDRKGSMQCATILKSLMSHSYSWVFLKPVDPVALSIPDYFTIISHPMDLGTIKSKLEKNIYSGTEEFAADVRLTFSNAMKYNPPSNDVHLMAKELSKIFDRKWKDLGRKWKCEDEHDKSESETIKETGRKSLDMLSRHRDSLPKKTQVSEHKGMPKIRSLATKLQACSYLIPRQEVIKADIVKRLDSKQYVHLQ

SEQ ID NO: 30505 - protein, 128 aa, Glycine max
  unsure (1)..(128): unsure at all Xaa locations
  Clone ID: TF_GmC1259_1.pep
ENVLNRLMSHQFGWVFNTPVDVVKLNIPDYFTVIKHPMDLGTVKKRITSGEYSNPMDFAADVRLTFENAMFYNPAGNDVHXMAETLSKFFETRWKAIEKKIPAIDSVASEPSRPTHVETEISDRVPPP

SEQ ID NO: 30506 - protein, 148 aa, Glycine max
  Clone ID: TF_GmC12104_17.pep
FGSSARRRQKGDTYGVFADPVDPEELPDYHDVIEHPMDFATVRKKLGNGSYTTLEQFETDVFLICSNAMQYNAPETIYHKQARSIQELGRKKFEKLRIGFERSQNELKSEQKAGSNYLVKKQPKKPLARASQEPRLTDLVLVFFLATI

SEQ ID NO: 30507 - protein, 610 aa, Glycine max
  unsure (1)..(610): unsure at all Xaa locations
  Clone ID: TF_GmC533_1.pep
MSSSAPRNKAKPGNKNQKPRGWNRGSSGKFESAVQSASPSTANAMLMKDCELLLKRXEANEYAWVFNTPVDVVKLNLPDYFTIIKRPMDLGTVKSKLAAGEYAGPLEFADDVKLTFSNAMNYNPSGNDVHLMADTLNKYFELRWKAIEKKLPKSDVLPIPAKPDNSEGVKTKRQAPPSKKRKIASLPPQPKVMPPTKKVMSDQEKHDLGRELESLLGEMPMHIIDFLKEHSSNGRECGDDEIEIDIDDLSDDTLFTLRKLLDDFLQEKQKNKAKVEACEVEVLNDSGPSNSSLQPFKGNDPADEEVDIGGNEPPVSSYSHVEIEKDTTYRVNKSLSPGSSNDTDSDSSSDSEADDVKASPANVAKAPENLGSEAQLDEMTMAAATLERNQSVSGLDQLEDNSQHKPSSFDSDCQQDGDSAPTERQVSPDKLYRAAVLKKRFLDTILKAREKTLTQGEKGDPEKLRQEREKLEMEQKKEKARLQAEAKAAEDARKRAEEEAAAEARRKRELEREAARQALLQMEKTVEINENSRILEDLELLRAVPTEQLPSSVDETSPAHSQDGLGSFKFGSSNPLEQLGLYIKADDEEEEGEPPCIPNPVNDVEEGEID

SEQ ID NO: 30508 - protein, 149 aa, Glycine max
  Clone ID: TF_GmC7409_1.pep
KRRSVTELEKIGADYMPPTKRQRGGGGEVGLANILESVVDTIVKDRYDLSYLFLKPVSKKEAPDYLDVIERPMDLSRIRERVRNMEYKSREDFRHDMWQITFNAHKYNDGRNPGIPPLADMLLEYCDYLLNENDDSLTEAEAGIEIRDF

SEQ ID NO: 30509 - protein, 86 aa, Glycine max
  Clone ID: TF_jC-gmXLIB3563P012bc09d2.pep
CQRQRLVKCVTLISLDLYYRFPAPFYPELIQSRLKNDYYRSVEGVNHDIMIMLSNAEEYFKITKNVQLVGKIRRISEWFRRKLERI

SEQ ID NO: 30510 - protein, 157 aa, Glycine max
  Clone ID: TF_GmC343932_1.pep
KKRRGKRKRKDCGRNMKEASVGESDLLDSADIVSWCKESSTSNCGEVAKSCGVDDQNRNLKKDRVEDMMEILDFIFETKGAPAFRRRLDSQKRGRYKKMIRQHMDFDTIRSRISSQTIKSSVELFRDLLLLTNNALVFYSKSTREYKTVLLLRGIVT

SEQ ID NO: 30511 - protein, 132 aa, Glycine max
  Clone ID: TF_uC-gmroLIB3258057e03a1.pep
FAADVRLTFSNAMKYNPPSNDVHLMAKELSKIFDRKWKDLGRKWKCEDEHDKSESETIKETGRKSLDMLSRHRDSLPKKQVSEHKRMPKIRSLATKDARVSVVVCEGEKSYCNTKEYNIITGIDEIKLVSTY

SEQ ID NO: 30512 - protein, 541 aa, Glycine max
  unsure (1)..(541): unsure at all Xaa locations
  Clone ID: TF_GmC4529_1.pep
MKRKRGHKKGKAKGSTNHGSSGADANKEETSGLEVDTPSSTGTGMDQQQHYNLANINPDGSVDKAIGRVKVKLKTPKILDSQPTSFDAPSPTQSDTERMEDSANSLPDMKLSTLFKRAASIKIKSSSNHTLSASTEITLPKERKNKQELDASLVVLRKVMKMDAAEPFNVPVNPEALGIPDYFDIINTPMDFGTICNNLEKNEKYMNSEDVFKDVQYVWDNCYKYNNKGDYILDLMRRVKKNFMKYWTAAGLYSEQSKGTKERTSAEDIALSGDGKAGKGGQLKQKTKKRHGRHHKHDCLCAICVLKRRRKEREENARIARSNFGSGGDKHANEFKHEESIQVESPGGEDSSSNIDESMGTDGDVDEDKGEVAKMEIAEKEXSPSERKHVSIDVDNDDDNDDHGLEEGEEEENGEEEDEEEIEMNSQKGEMNETLKHGGTLEEKSNVGDATALHDEYRTKQQEGQSAAVQQQKKHKGSQDKQQKAKLLESLYSENHKLSSLCGILFPQNSQSVWSGPHSLIQKRNSARTSSIHAAIRTFMG

SEQ ID NO: 30513 - protein, 343 aa, Glycine max
  unsure (1)..(343): unsure at all Xaa locations
  Clone ID: TF_GmC629_1.pep
MDADPPQLDDHLEPFRVSVNQILTTVNKLEKQVTEVEQFYESTDNVQGNNSKGGSLAKEKGREKHITGTKKPLQDASHTEASSAKRMQELMRQFSTILRQITQHKWAWPFMDPVDVEGLGLHDYYEIIDKPMDFGTIKSKMEAKDGTGYNNVREIYADVRLIFKGKMAATFTXNDVHVMAKTLLEKFEEKWLQLLPKVAEEEKRQLEEEAQAQLDIQLALETTYANKAKDISTELCEIDMHLKSLKEMVIQQCRALDIIAETNPMFQPSSTEDVVLDLDAQSDYTLWRLKAFVKDSLEEQVKVNAGAGINPNDNPDDKKNKKRRDSGDSSGKTNPKRKKLSTL

SEQ ID NO: 30514 - protein, 432 aa, Glycine max
  Clone ID: TF_GmC1758_1.pep
MLPGSYTPLLSVQSKQQHSFILITSLPIAHSSSLHSTFLSPLASFYQWPAGLCCVSFITSFNISPLACFPMAAAVSAAVSFPSTKSTSLPSRTSLIAPERVVFKKASLQNRDVSSSGRVVSIRAQVTTEAPAKVEKESKKQDEGVVVNKFKPKTPYIGRCLLNTKITGDDAPGETWHMVFSTEGEIPYREGQSIGVIPDGIDKNGKPHKLRLYSIASSAIGDFGDSKTVSLCVKRLVYTNENGEIVKGVCSNFLCDLKPGAEVTITGPVGKEMLMPKDPNATIIMLGTGTGIAPFRSFLWKMFFEKHEDYKFNGLAWLFLGVPTSSSLLYKEEFEKMQEKSPDNFRLDFAVSREQTNEKGEKMYIQTRMAQYAEELWELLKKDNTFVYMCGLKGMEKGIDDIMVSLAAKDGIDWTEYKRQLKKAEQWNVEVY

SEQ ID NO: 30515 - protein, 107 aa, Glycine max
  Clone ID: TF_LIB3138-023-Q1-N1-B1.pep
IKSKLERNIYSGTEEFADDVRLTFSNAMKYNPPGNDVHMMAKELSKIFDRKWKDFGRKWKFEDEHDKSETETIKETGRKSLDAMLPRHKDSLPKKNTIIRTQRNAQD

SEQ ID NO: 30516 - protein, 292 aa, Glycine max
  Clone ID: TF_GmC105619_1.pep
GGITYRPYASQRFGEIAFCAITADEQVKGYGTRLMNHLKQFARDMDGLTHFLTYADNNAVGYFIKQGFTKEIHLEKDRWQGYIKDYDGGILMECKIDPKLPYTDLSTMIRRQRQAIDEKIRELSNCHIVYAGIDFQKKEAGIPKKIIDDIPGLREAGWTPDQWGHSRFRTLNVSSDNATNQKHLNGFMRSLLKSMFDHADAWPFKEPVDARDVPDYYDIIKDPMDLKTMSKRVDSEQYYVTFEMFVADARRMFANARTYNSPETIYYKCSTRLEAHFQSKVQAGLQPGTKIQ

SEQ ID NO: 30517 - protein, 269 aa, Glycine max
  unsure (1)..(269): unsure at all Xaa locations
  Clone ID: TF_GmC399618_1.pep
LEISITGVPHDAVQVFIRFLYTSSCEKEEMDEFVLPLLVLSHVYVVPHLKRECEQKLELSLLTIDNVVDVFQLALLCDAPRLNLICHRKVLKNFKVVSETEGWKTMKLSHPALEKEIVESMVDEDIIKKEKIRKNKEREIYLQLYEAMEALXHICRDGCRTIGPHDKDSIANQPCKYTACNGLELLVRHFAGCKLIVRGGCVHCNRMWQLLELHSRLCVDPDYCRVPLCRNFKERISKQIKKDEIRWKILVQKILRTRGIGIASCFLPQ

SEQ ID NO: 30518 - protein, 173 aa, Glycine max
  unsure (1)..(173): unsure at all Xaa locations
  Clone ID: TF_GmC328_8.pep
LNFMYSNTLSITSPPALLDVLMAADKFEVASCMRYCSRLLRNIPMTPESALLYLELPSSVLMADAVQPLTDAAKQYLASRYKDITNFTYXRFQEEVMGLPLAGIEAILSSDELQVASEDAVYDFVLKWVRTQYPKLEERREVLGTRLARLIRFPYMTCRKLKKVLTCNDFDHD

SEQ ID NO: 30519 - protein, 262 aa, Glycine max
  unsure (1)..(262): unsure at all Xaa locations
  Clone ID: TF_GmC935_2.pep
MVRNRRKMLPRRCTASMGSSNGSESDASDLVMRCPSCEGEYDMDDSGPFRECFPEAHEAEEELRREIEELQXKVSFLNSPLSQTKSFNRRNHPRSRRRIPSRSNSRSQAPFWLSRSXPVFKAMLENXMAERRSGTIKISDVSYDTLHAFVNYLYTAEASLDNELACNLLVLGEKYQVKHLKTYCEKYLIAKMNWDKAISNYAFAYQYNCKQLQSVSLAVILDHMDSLTQNECYAELVDTNPRLVVEIYETYIGRLLNTAGAF

SEQ ID NO: 30520 - protein, 69 aa, Glycine max
  Clone ID: TF_LIB3056-012-Q1-N1-E9.pep
FSDISIYIEGQGLIARAHKVILGIYSVLLTKMFTNGMCESNSPEVCLKDVSSAALNAMLEFMYCMDLKY

SEQ ID NO: 30521 - protein, 346 aa, Glycine max
  Clone ID: TF_GmC523_9.pep
MAPQTISILNLLPEPDVFIHTSHGTRIPAHAPILASMSPVLENLIDRPRKHRSSERIIQIHGVPCDAVTAFVRFLYSSRCTEEEIDQYGMHLLALSHVYMVQQLKQRCIKGLTHRLTTESVVDVLQLARLCDAPDLHLRCMKLLAKNFKAVEATEGWKFLVKHDPWLELDILRFIDEHETRKKKSRRYRMEQGIYAELSEAMECLEHICYEGCTHVGPYDAEVKRERTPCGRFATCQGLQVLIRHFATCEKKVRGGCVRCKRMWQLFRLHSYVCHDTDSSCKVPFCRQFQLRMQQEKRKDDAKWKLLARKVASAKVMSSLSLPKRKRDEETRVTMDNPGIRSFKLL

SEQ ID NO: 30522 - protein, 351 aa, Glycine max
  Clone ID: TF_GmC523_10.pep
MAPQTISIHYHTTRFLPQPDVFIRTSHGTRIPAHAGILASMSPVFDNFIDRPRKHRSSERIIQIHGVPCDAVTAFVGFLYSSRCTEEEMDKYGMHLLALSHVYMVPQLKQRCIKGLTHRLTTENVVDVLQLARLCDAPDLHLRCMKLLANNFKAVEATEGWKFLVKHDPWLELDILRFIDEHETRKKKSRKYRMEQGLYAELSEAMECLEHICYDGCTHVGPYDAAEVKRERTPCGRFATCQALQVLIRHFATCEKKVRGGCVRCKRMWQLFRLHSYVCHHTDSSCKVPFCRQFQLRMQQEKRKDDAKWKLLARKVASAKVMSSLSLPKRKRDEETRVNINNPGIRSFKLL

SEQ ID NO: 30523 - protein, 184 aa, Glycine max
  Clone ID: TF_9258031.pep
MKKGFQFAGYDKATIGTITLDCQSPYGEKRNRCALLPPNVPILAHSLERTQRNWIARSNSPTDIIIQVGDSSFHLHKLAIASRSEYLNRLVFQRGSNREKAGDSLIIQMKNLPGGKKTFELVVKFCYGRKIDITAANIVPLYCSAHFLEMSEDVEDGNLISKTESFLTFLILSSWKDTFRILRA

SEQ ID NO: 30524 - protein, 222 aa, Glycine max
  Clone ID: TF_GmC248068_1.pep
MRGWNQFETIYEEEQELSSTSSPFLSPSSSSSPPPPPSLHSIVNAWSLDSGSEPDVLICVQGTSFRLHKVRLISRSSYLKRHLTGVSDLTLSPPLNLTAETFAAVAEFCYSRRVHLTPSNVAAVRVAAELLGMTGEENLREVTESYFERVVGIGASMVLRSCVALLPEAETTASLASRCIEALVWEDDVSCMSDVVGMHPQDFQTGSYSLNRRVPNHDVLYK

SEQ ID NO: 30525 - protein, 100 aa, Glycine max
  unsure (1)..(100): unsure at all Xaa locations
  Clone ID: TF_GmC138527_1.pep
AVSNIRRNFSLALSLQFNTSRIEGTVGKEIFHHTPYSIKNLRFLYGGILKNIVIPNIKWGVFELMMRYVXTGTVNVNLDIAEDLWRAADQYLLDHLKRYF

SEQ ID NO: 30526 - protein, 327 aa, Glycine max
  Clone ID: TF_GmC6774_1.pep
MDSPAVSSIHFHNAHVLPEPDLFMHTPGGNRIPAHATILASASPVLENVIASNRVVKIHGVPDGAVTAFVAFLYSSRCTEEDMDKYGIHLLALSHVYSVPQLKQRCIKGLAQRLSTENVVDVLQLSRLCDAPDLYLKCVKLLRNRFKAVKETEGWKFLESHDPWLELDVLRLMGELEKRKRRVRKWREEERLYVQLSEAMECLEHICTEGCTEVGPYEVEVGRQKTPCSKFATCQGLQVLIRHLGTCNRLVKGGCLRCKRMWQLFRLHSSICLCQNSCKVPLCRQIRLKMEQENMKDDARWKLLVRKVASAKALSSLALPKRKLDQS

SEQ ID NO: 30527 - protein, 308 aa, Glycine max
  Clone ID: TF_GmC54082_1.pep
MATPNNRLSLAMERTGQWVFSQDIPTDVIVEVGETTFSLHKFMLVAKSNYIRKLILESDESELTRIDLSDIPGGPSIFEKTAKFCYGVNFEITVHNVAVLRCAAEFLQMTDQYCENNLAGRTEEFLTQVAFFTLTGAVTVLKSCRHLLPYADDINVVKRCVEAVSAKACSEANFPSRSPPNWWTEELALLDIDFFARVIDAMKQRSAKALTVAAALITYTERALRDLVRDHTGNGIRSSDPGDSDSRSKQRKLLEAIVDPFPSEKAAFPIHFLCCLLRCAIYLRAYAGCKTELEKRISAILEHVTVDN

SEQ ID NO: 30528 - protein, 419 aa, Glycine max
  unsure (1)..(419): unsure at all Xaa locations
  Clone ID: TF_GmC7983_24.pep
MLEKLNTYSRYTSSLESYGSFDKLQLVINLIGLTCLSSLPEYQSCIIESKGIKAIVLLVKRCLSNDIHVERRNFTPHLHTTFQERSCCCMDKEDWEGSNVLLFYSLLGLSEILRQCDLLQDNSQQYSREVTNIRAQLVSKLHEICSGNSFSPGVRWYVLYILTYFGFYGFPNELAKRIGKSLNKEEYSDMRLVVSSHVEYEALVLLLKYEYLGCLHAGEETVKKLKILAKRCKLQHLLQMLYRQRPKWGTPFPSFNLTPSLGSAGSCFSDAILEAKSNKLVGWTCNICSDTVPHMHVHKVILQSGCDYLQGLFRSGMRESHSQVIKVDISWEALIKLVQWFYSDELPNPPSGCMWDNMDDEEKLFNLHHMWSFVXLAEFWILENIQEACWNVIMSCLDNEQFFIQIHTINSGCYYRLEN

SEQ ID NO: 30529 - protein, 264 aa, Glycine max
  Clone ID: TF_GmC68877_1.pep
STTAASDLSLKELGAYFISSAMKRASEWAYSHEIPSDVTIQVGEVSFSLHKFPLVSKSGYIGKLVSESSDAFIELYDVPGGAEAFELATKFCYGINFEISIENIAMLRCVAEYLDMTEDYSVGNLVGRADSYLNEVALKTISGAVSILHMSERFLPIAEKAKLVSRCIDAIAFIASKETQFCSPMRGDIIGTDGMASHQRPVVHWWAEDLTVLRIDIFQRVLIAMMARGFKQFALGPIIMLYAQKSLRGLVRLKPLTPKVLTYK

SEQ ID NO: 30530 - protein, 194 aa, Glycine max
  unsure (1)..(194): unsure at all Xaa locations
  Clone ID: TF_GmC253982_1.pep
RNSRVDPRVRGRVGDLIRICRXCRCESLHKVLEKELIHQKYADYKALGDVDNSQKRYILQGLSLPQEDRLPAALHRILLTALSNSTRQSGQEDEIDKLVTRMGAMQMAKSLDDLADVCVRVDRKIFRCHQVILASRSEYFKARLSHMKDFHEDIDELSVDILPCLEEHDLSMEAEKMIEYMYTGSFAGYKSRSG

SEQ ID NO: 30531 - protein, 395 aa, Glycine max
  Clone ID: TF_700895650_FLI.pep
KCVCLVVFILQLFSNGMRESEQRHVALRINASEEAALMELLNFMYSNTLSITSPPALLDVLMAADKFEVASCMRYCSRLLRNIPMTPESALLYLELPSTVLMADAVQPLTVAAKQYLASRYKDITKFQEEVMGLPLAGIEAILSSDELQVASEDAVYDFVLKWVRTQYPKLEERREVLGTRLARLIRFPYMTCRKLKKVLTCNDFDHDVASKLVLEALFFKAEAPHRQRILAAESASFNRLFVERAYKYRPVKVVEFELPRQQCVVYLDLKREECANLFPSGRVYSQAFHLGGQGFFLSAHCNMDQQSSFHCFGLFLGMQEKGSVSFAVDYEFAARSRPTEEFVSKYKGNYVFTGGKAVGYRNLFAIPWTTFMAEDSLYFINGALHLRAELTIRH

SEQ ID NO: 30532 - protein, 105 aa, Glycine max
  Clone ID: TF_GmC130929_1.pep
KNSTPPRGRNNNVSPAAIEFWERLFYHGYKADVCINTDNGGVVYAHSNILAMSTPVFRGMLKQANCHRRWRTISITGVPHDAVHSFIRFLYTSRYKKEEMDEFVL

SEQ ID NO: 30533 - protein, 413 aa, Glycine max
  unsure (1)..(413): unsure at all Xaa locations
  Clone ID: TF_GmC337_1.pep
MGKIFRENAKPSANSSSAYPSAAPATTSSTSVTETVRGSHQFKMTGYSLSKGIGIGKYMASDVFSVGGYNWAIYFYPDGKSVEDNATYVSLFIALASEGTDVRALXFELTLLDQSGKERXKVHSHFXRGTLESGAYTPLKYRGSMWGYKRFFKRTALETSDYLKDDCLSVNCSVGVVRSHTEGPKIYTIAIPPSSIGQKFGQLLESGKGSDVNFEVNGDIFAAHKLVLAARSPVFRAQLFGPMKDQNTQRIKVEDMEAPVFKALLHFIYWDSLPDMQELTGLNSKWASTLMAQHLLAAADRYGLERLRLMCEASLCEDVAINTVATTLALAEQHHCFQLKAVCLKFIATSENLRAVMQTDGFEYLKESCPSVLTELLEYVARFTEHSDIMCKHRNEALLDGSDINGRRVKQRL

SEQ ID NO: 30534 - protein, 205 aa, Glycine max
  Clone ID: TF_GmC141051_1.pep
MSMEEPQFREHPKAKIATIPPSQHSDGAAAELRGADCNLASLCEHVQIEGFNSGSFSDIVVNAMGSTYHLHRLILSRSSYFRNMLHGPWKEAGAPVVALHVDDKNVNDEAIAMALAYLYGHHPKLNDNNAFVLAAAVFLDLQDLCGIWTDFIISDLWTLNFLAYKVFAENHDYGMHGERGRTGCWGYLWQSGGMEFEEGAPKLLF

SEQ ID NO: 30535 - protein, 414 aa, Glycine max
  Clone ID: TF_GmC1088_1.pep
MAELEEERMGDFKPFSEGSSCSRSISETVNGSHQFTIKGYSLAKGMGAGKYIMSDTFTVGGYDWAIYFYPDGKNPEDNSMYVSVFIALASDGTDVRALFKLTLVDQSEKGNDKVHSHFDRPLESGPYTLKYKGSMWGYKRFFRRTQLETSEYLKNDCLVMHCTVGVVKTRFEGSKQGVIVPQSDMGRDFKDLLESEVGCDILFKVKSESFKAHKLILAARSPVFRAQFFGLVGDPTLEEVVVEDIEPFIFKAMLLFVYSDKLPGIYEVMDSMPLCSYTVMVQHLLAAADLYNLDRLKLLCESKLCEEINTDNVATTLALAEQHHCPQLKAICLKYIANPANLGAVMQSEAFVHLKESCPSMLLELLETFASVDDNSGQTLSRKRSGSSIYGQDLADGAAAESVNPNGRRVRRRT

SEQ ID NO: 30536 - protein, 125 aa, Glycine max
  Clone ID: TF_GmC127114_1.pep
MAEKLDTRKDSPMMDGGSPALTSSIVTVIVGSDQRLFAAHEDVLSHSPYFAELLRGQFFESANRRIDLPTEEPEIFSCILEYLYKGDYYPRLVQDKRRQTWMLEGAIASPDPNKPGDRAAAVEPT

SEQ ID NO: 30537 - protein, 210 aa, Glycine max
  Clone ID: TF_GmC6844_2.pep
LESGKDSDVSFEGHGEIFAAHKLVLAARSPVFRAQLFGPMKNQNTHCIKVEDMEAPVFKALLHVIYWDSLPDMQELTGLSSKWATTLMAQHLLAAADRYGLERLRLMCETSLCEDVAINTVATTLALAEQHHCFQLKAVCLKFVARPENLRAVMQTDGFEYLKESCPSVLTELLEYVARFTEHSDFLCKHRNEVILDGSDVNGRRVKQRL

SEQ ID NO: 30538 - protein, 190 aa, Glycine max
  Clone ID: TF_GmC1493_3.pep
ARNSARALLHFIYRDTLIDDEELFMSRSSFLPSVSESFAAKLLAAAEKYGLPRLKLMCESVLCKDISIDSVAYILALADRYRATELKSVCLQFSAENLVAVMQSDGFEYLKENCPLLQSELLKTVAGCEEEFSGEGKCRSVWAQFSDGGDTNDRSVRQQTWENGVERSQSLWVHLSDGVNNNDRSPGQEA

SEQ ID NO: 30539 - protein, 212 aa, Glycine max
  Clone ID: TF_GmC976_1.pep
TSQTCHLNHSMHGGEPCSIWAEGFTQQRSNAKAIESLGRMLTEGIHTDITINASDGSIGAHRAVLAARSPVFRSMFSHNLQEKELSTINISDMSLESCQAFLNYLYGIIKHEEFLTHRLALLHAADKYDISDLRDVCHESLLEDIDTKNVLDRLQNASLYQLMKLKMSCIRYLVKFGKIYEIREDFNTFLQNADRDLIAEVFHEVLDAWKGF

SEQ ID NO: 30540 - protein, 410 aa, Glycine max
  Clone ID: TF_GmC337_2.pep
MGKILQETAKPSANSTSAYPSAAPGTTSSMSVTETVRGSHQFKITGYSLSKGIGIGKYMASDVFSVGGYNWAIYFYPDGKSVEDNATYVSLFIALASEGTDVRALFELTLLDQSGKERHKVHSHFERTLESGPYTLKYRGSMWGYKRFFKRTALETSDYLKDDCLSVNCSVGVVRSRTEGPKIYTIAIPPSSIGQKFGHLLESGKGSDVNFEVNDDIFAAHKLVLAARSPVFRAQLFGPMKDQNTQCIKVEDMEAPVFKALLHFIYWDSLPDMQELTGLDSKWASTLMAQHLLAAADRHGLERLRLMCEASLCEDVAINTVATTLALAEQHHCFQLKAVCLKFIATSQNLRAVMQTDGFEYLKESCPSVLTELLEYVARFTEHSDIMCNHRNDALLDGSDINGRRVKQRL

SEQ ID NO: 30541 - protein, 274 aa, Glycine max
  Clone ID: TF_GmC337_3.pep
MYIPFDWGYKRFFKRTALETSDYLKDDCLSVNCSVGVVRSRTEGPKIYTIAIPPSSIGQKFGHLLESGKGSDVNFEVNDDIFAAHKLVLAARSPVFRAQLFGPMKDQNTQCIKVEDMEAPVFKALLHFIYWDSLPDMQELTGLDSKWASTLMAQHLLAAADRHGLERLRLMCEASLCEDVAINTVATTLALAEQHHCFQLKAVCLKFIATSQNLRAVMQTDGFEYLKESCPSVLTELLEYVARFTEHSDIMCNHRNDALLDGSDINGRRVKQRL

SEQ ID NO: 30542 - protein, 328 aa, Glycine max
  Clone ID: TF_GmC141_1.pep
MGGLQIRSRMAKEIVKELLPLIRVYKDGSVERLLSSENVAASPEDPQTGVSSKDIVIADNPYVSARIFLPKSHHTNNKLPIFLYFHGGAFCVESAFSFFVHRYLNILASEANIIAISVDFRLLPHHPIPAAYEDGWTTLKWIASHANNTNTTNPEPWLLNHADFTKVYVGGETSGANIAHNLLLRAGNESLPGDLKILGGLLCCPFFWGSKPIGSEAVEGHEQSLAMKVWNFACPDAPGGIDNPWINPCVPGAPSLATLACSKLLVTITGKDEFRDRDILYHHTVEQSGWQGELQLFDAGDEEHAFQLFKPETHLAKAMIKRLASFLV

SEQ ID NO: 30543 - protein, 649 aa, Glycine max
  unsure (1)..(649): unsure at all Xaa locations
  Clone ID: TF_GmC1416_1.pep
MLLVSPADQVEDEVDAADCYNYKNMDYDKWGLKKFLESWDLSDVLFIVGKEEKPVPGPRAILAASGKFSLCSSSFVINLPTVSYLLFRALLHYIYVGWTQIPQEQLGSLRDLSLQFEVTPLVKQCEETMERFKLDKKLFDTGKNVELTYPSIRPHCSTLPSLPVSTQQLKQLKLTGQYSDVNIYIEGYGLIARAHKIVLSLWSIPFARMFTNGMSESMSSEVTLRDVPPEAFKAMLNFLYDGQLNDKVIDSGVGLVXVLFIVGKEEKPVPAHKAILAASXVSEDSVCPLLQVVSSMPSCRLIKESLQRRISMNFDYYISASTDFVLLDETTLINIIKHPDLTVTSEEKKVLNAILMFGMNAKQLFGWEVVDQLMENSKPELLFGERLQLIYDLLPFVRFPLLQYSLLEKLQHSSIGRHIPVFQNLVNEAINFVKCGLAESENEENVRFQHRRSSYRELQYICDGDDHGVLYFAGTSYGEHPWVNPLLAEPRKITITASSPHSRYTDPKVLVSRTYQGTCFAGPRLENGQNCSWWMVDLGQDHQLMCNYYTSGQNYSKAVPGFWHVQGPRDASIRVFSGFDQSNRIICNPGQFALHILCIPKKLIYWPIIGPNALLPFRYFRVVLTGTTTDATNPWNFCICYLELYGYFL

SEQ ID NO: 30544 - protein, 327 aa, Glycine max
  Clone ID: TF_GmC130_1.pep
MGDRVETLARLAQWKIDNFGLCSYKKSDPFKVGIWNWYFSIVRNRYLYIHLFPEPSQVLKDNPPFARFILRVSNAGSSRSFHISPVQEKLLRTHDDFVWPVDTTFVGRFIIDVEFLDLKICPPNGGETSPVWPSDGNSQSIAFQSSILRCLSRMLDEAIHADLTIMTADGSTLRAHKAVLSASSPVFQSMFHHNLKEKESSTIHIEDMPLESCTALLSYLYGAIKQEDFWKHRLALLGAANKYDIGSLKDICEESLLEDLSAGNVLEMLNEAWLYQLHKLKKGCLVFLFQFGKIHDIKDEINNFFQHADRELMLEMFQEVLSISNPI

SEQ ID NO: 30545 - protein, 318 aa, Glycine max
  Clone ID: TF_GmC141_3.pep
IRLELEPDNVSDFIRVGGIQRLQDGEFIVQATKDCVAKTLKRLEEKIHGRVLNHLLYLMRVSEKAFQRRVALTLAHLCSADDQRKIFIDYNGLELLMGLLGSYNPKQQLDGAVALCKLANKAMTLSPVDAAPPSPTPQVYLGEQYVNNVTLSDVTFLVEGKRFYAHRICLLASSDAFRAMFDGGYREKEARDIEIPNIRWEVFEPMMRFIYTGSVDITLDIAQDLLRAADQYLLEGLKRLCEYTIAQDISLENVSSMYELSEAFNAISLRHTCILFILEHYDKLSGKPGHSHLIQRIIPEIQNYFVKALTKANSNILP

SEQ ID NO: 30546 - protein, 553 aa, Glycine max
  Clone ID: TF_GmC328_2.pep
MKDFNSDLFDPGTVMDSSSSDYSRSASSSDADFGFAFNDSNFSDRILRIEIMGDPVEARPDSDGCTTIADWARHRKRRREDIKKDNVVDLTLLPDEQILNGNQPDMDDFVPSENQDEDAVAMVEEPPSGDEAANSNDSNWNMDCSAVVRVKTLHISSPILAAKSPFFYKLFSNGMKESEQRHVTLRINASEEVSLMELLNFMYSNTLSITSPPALLDVLMAADKFEVASCMRYCSRLLRNIPMTPESALLYLELPSSVLMADAVQPLTDAAKQYLASRYKDITKFQEEVMGLPLAGIEAILSSDELQVASEDAVYDFVLKWVRTQYPKLEERREVLGTRLARLIRFPYMTCRKLKKVLTCNDFDHDVASKLVLEALFFKAEAPHRQRILAAESASFNRLFVERAYKYRPVKVVEFELPRQQCVVYLDLKREECANLFPSGRVYSQAFHLGGQGFFLSAHCNMDQQSSFHCFGLFLGMQEKGSVSFAVDYEFAARSRPTEEFVSKYKGNYVFTGGKAVGYRNLFAIPWTTFMAEDSLYFINGVLHLRAELTIRH

SEQ ID NO: 30547 - protein, 324 aa, Glycine max
  Clone ID: TF_GmC120817_1.pep
MSDSKVETIARLAQWKIDNFGPCSYKKSDPFKLGIWNWFMSIERNRYLYIHIFPEPSRLTKEQPPVARFILRVSNNSGPTRKFYISPVHERVLRTCEDFVWPVDTAFLGRFVIDIEFLDLRTCPVNGETRSVWPSDGKLQTVAAQSTLRCLSRMLDEAIHADLTIITADGTLRAHKAVVSASSTVFHSLYLHNGDEKETSTIHIEDMSQESCMALLSYLYGTIKQQDFWKHRLALLGAANKYEIGDLKDASEESLLEDLNSGNVLDRLNDAWLYQLQALKKGCFSYLFYYGKIYDVRDEMDTFFRHADRELMLEMFQEVLTISK

SEQ ID NO: 30548 - protein, 444 aa, Glycine max
  Clone ID: TF_uC-gmrominsoy195d07_FLI.pep
ENQDEEPDAMVEEPHSGDEATNSNDSDWSMDCSAGAVVRVKTLHISSPILAAKSPFFYKLFSNGMKESDQRHVTLRINASEEVALMELLNFMYSNTLTTTTAPALLDVLMAADKFEVASCMRYCSRLLRNMPMTPDSALLYLELPSSVLMADAVQPLTDAAKQYLAGRYKDITKFQEEVMALPLAGVEAILSSDDLQVASEDAVYDFVLKWSRQQYPKLEDRREVLGARLARLIRFPYMTCRKLKKVLTCSDFDHDIASKLVLEGLFFKAEAPHRQRSLAAEDSASSNRRFVERAYKYRPVKVVEFELPRQQCVVYLDLKREECNNLFPSGRVYSQAFHLGGQGFFLSAHCNMDQQSSFHCFGLFLGMQEKGSVSFAVDYEFAARSRPTEEFVSKYKGNYVFTGGKAVGYRNLFAIPWTSFMAEDSLYFINGVLHLRAELTIKH

SEQ ID NO: 30549 - protein, 281 aa, Glycine max
  Clone ID: TF_GmC1416_4.pep
NSARAQQLKQLKLTGQYSDVNIYIEGYGLIARAHKIVLSLWSIPFARMFTNGMSESMSSEVTLRDVPPEAFKAMLNFLYDGQLNDKVIDSGALLLQLLLLADQFGVTFLQQECCKMLLECLSEDSVCPLLQVVSSMPSCRLIKESLQRRISMNFDYYISASTDFVLLDETTLINIIKHPDLTVTSEEKVLNAILMFGMNAKQLFGWEVVDQLMENSKPELLFGERLQLIYDLLPFVRFPLLQYSLLEKLQHSSIGRHIPVFQNLVNEAINFVKCGLAESEN

SEQ ID NO: 30550 - protein, 308 aa, Glycine max
  unsure (1)..(308): unsure at all Xaa locations
  Clone ID: TF_GmC976_2.pep
MSDSAYRVETTPRLAQWRIENLASCTYRKSDPFKIGNWNWHLSVEKNRVLFVKLFPEISNLTRDNPPIASFIVRVVSSVGDRKAITHPEIKDKVLKNNEDFVWAIEVPLTGKFIIDVEFLDLKTASPNGGEGIMYSLXIWAEGFTQQRSNAKAIESLGRMLTEGIHTDITINASDGSIGAHRAVLAARSPVFRSMFSHNLQEKELSTINISDMSLESCQAFLYYLYGIIKHEEFLTHRLALLQAADKYDISDLRDVCHESLLEDIDTKNVLERLQNASLYQLXNFLRNADRDLISEVFHEVLDAWKGF

SEQ ID NO: 30551 - protein, 301 aa, Glycine max
  unsure (1)..(301): unsure at all Xaa locations
  Clone ID: TF_GmC130_2.pep
MGDRVETLARLAQWKIDNFGPCSYKKSDPFKLGIWNWXLKDNPPFSRFVLRVSXLHISPVQEKLLRTHDDFVWPVDTTFVGRLIIDVEFLDLKICPPNGGETSSVWPSDGNSQSIAFQNNTLGCLSRMLDEAIHACLPIMTADGSTLRAHKAVLSASSPVFQSMYHLNLKEKXSSTIHIEDMSLESCTALLSYLYGTIKQEDFWKHRLALLGAANKXDIGSLKDICEESLLEDLSTRNVLEKLNEAWLYQLHKLKKGCLVFLFQFGKIHDIKDEINNFFQHADKELMLEMFQEVPSISNPV

SEQ ID NO: 30552 - protein, 388 aa, Glycine max
  unsure (1)..(388): unsure at all Xaa locations
  Clone ID: TF_GmC1467_1.pep
MAGAALSPPTSSKSVTQTVNGSHKFVIEGYSLAKGMGVGKHIASDVFTVGGFHWAIYFYPDGKNPEDNSAYVSVFIALASEGTDVRALFELTLLDQSGQGKHKVHSGYLSQALXYGKLMLDQSESMLGYKRFFRRSLLETSEFLKNDCLKINCTVGVVVSAIDCPQLHSINIPESDIGSHFGALLDNMEGSDITFDVAGDKFPAHKLVLAARSPEFRSKFFNGLDEEKNEIIVTDLEPKVFKAMLHFIYKDTLTEEVDTVSSTTTSDFPVSEILTAKLLAAADKYDLGRLRLMCESRLCKDICVNSVANILTLADHCHATELKAVCLKFAAQNLAAVMRSDGFEHMKEKGPWLQSEILKTIAGCEGDGCSAVEXSLRVYGANFQMAVT

SEQ ID NO: 30553 - protein, 434 aa, Glycine max
  Clone ID: TF_GmC1493_1.pep
MHTASRSNGGGGGVLASRTSSRSVTETVNGSHKFVIKGYSLAKGIGVGKHIASETFTVGGYQWAIYFYPDGKNPEDNSAYVSVFIALASEGTDVRALFELTLLDQSGNGKHKVHSHFDRSLESGPYTLKYRGSMWGYKRFFKRAQLEASTFLKDDCLKINCTVGVVVSSIDCSKLNTIQVPESDIGAHFGMLLENEEGSDVTFSVGGERFHAHKLVLAARSTAFETEFFNGMEEDDHDVVVTDMEPKVFKALLHFIYRDTLIDDEELFMSRSSFLPSVSESFAAKLLAAAEKYGLPRLKLMCESVLCKDISIDSVAYILALADRYRATELKSVCLQFSAENLVAVMQSDGFEYLKENCPLLQSELLKTVAGCEEEFSGEGKCRSVWAQFSDGGDTNDRSVRQQTWENGVERSQSLWVHLSDGVNNNDRSPGQET

SEQ ID NO: 30554 - protein, 259 aa, Glycine max
  Clone ID: TF_GmC141_7.pep
GSRKGPTRPVALALAHLCSSDDQRIIFIDHYGLELLIGLLGSSSSKQQLDGAVALSKLANKALTLSPVDAAPPSPTPQVYLGEQYVNNATLSDVTFLVEGKRFYAHRICLLASSDAFRAMFDGGYTEKEARDIEIPNIRWEVFELMMRFVYCGSVDVTLDIALDLLRAANQYLLEGLKRLCEYTIAQDISPENVSSMYELSEAFNAISLRHACILFILEQFDKLSSRPGHSLLIQRIIPEIRNYFVKALTKANSHDNQL

SEQ ID NO: 30555 - protein, 520 aa, Glycine max
  Clone ID: TF_GmC44146_1.pep
MTEADTDDVGTKCNFSFAFNNINFSDRILNIEVIPDPHFIRAQSHSLSTLAPNRKRRRLSLMKANDVLLQPEEKLNCNLPDAEEVVAITEASLSGDEVSHGNDSSLGMSWSKVLRVRTIQISSPILAEKSPFFYKLFSNVTRESKQQNVTLQIHDSEEAAVMDLLNFMYSNTLSRTTSAAVLDVLMAADKFEVMSCIRYCSRMLGLMPMTCESALLYLDLPSNILTLDAIQPLVDTAKLFLATHYRDITKFADELLNLPLAGIEAVLSSDDLQMPSEDVVFEFVLKWARIHYPKIEDRKDVLEARLGRLIRFPYMSSRKLKKVLTCNDFHPDFASRVRLEALFYKAETPYRQRSLAAQDAGTTYSRLVERAYKLRHVKVVEFALPRPRCVVYLDLKKEECAQFFPNARIYSQAFPLGEQWFFLSARCNMDQQNASHCFGLFLAVQFKGSVSLHVDYEFAARSKSTEEYISRCKGDYTFTAGKAVGYRNLFGIPWTAFIADDSHFFIKGLLHLRAELTIRQ

SEQ ID NO: 30556 - protein, 146 aa, Glycine max
  Clone ID: TF_GmC581776_1.pep
ARSEIFKNMLECDECKAAPSNAITIPDLNHEELESLLEFLYSGTLNVEKLEKHVYALSQAADKYVIPHLLKHFERYMLSSISTSNGLEALGIADTCSNLKVKEPTLNFLVKNIEHMVSSPKFEAFVHRSPHLNVELVARAFVNGAK

SEQ ID NO: 30557 - protein, 187 aa, Glycine max
  Clone ID: TF_GmC129068_1.pep
MSLEESLRSLSLDYLNLLINGQAFSDVTFSVEGRLVHAHRCILAARSLFFRKFFCGPDAPCGLDPAGPRGVNSSRSGVIPVNSVGYEVFLLMLQFLYSGQVSIVPQKHEARPNCGERGCWHTHCTSAVDLALDTLAAARYFGVEPLALLTQKQLASMVEKASIEDVMKVLLASRKQDMQQLWSTCSH

SEQ ID NO: 30558 - protein, 545 aa, Glycine max
  Clone ID: TF_GmC141_2.pep
SQKWVLWHGFNSSRIGSSTNLAHENSSIKTRVRKEGGIPPLVHLLEFADTKVQRAAAGALRTLAFKNDENKNQIVECNALPTLILMLRSEDAAIHYEAVGVIGNLVHSSPDIKKEVLLAGALQPVIGLLSSCCSESQREAALLLGQFAATDSDCKVHIVQRGAVRPLIEMLQSSDVQLKEMSAFALGRLAQDTHNQAGIVHNGGLMPLLKLLDSKNGSLQHNAAFALYGLADNEDNVSDFIRVGGIQRLQDGEFIVQATKDCVAKTLKRLEEKIHGRVLNHLLYLMRVSEKAFQRRVALTLAHLCSADDQRKIFIDYNGLELLMGLLGSYNPKQQLDGAVALCKLANKAMTLSPVDAAPPSPTPQVYLGEQYVNNATLSDVTFLVEGKRFYAHRICLLASSDAFRAMFDGGYREKEARDIEIPNIRWEVFELMMRFIYTGSVDITLDIAQDLLRAADQYLLEGLKRLCEYTIAQDISLENVSSMYELSEAFNAISLRHTCILFILEHYDKLGGKPGHSQLIQHIIPEIQNYFVKAITKANSNIQP

SEQ ID NO: 30559 - protein, 491 aa, Glycine max
  Clone ID: TF_GmC1802_1.pep
MASSKTTNPTTTTTQLEPLPPPQQRHPPPPHHQLQQHHHHHHHHQQIHDHHQISFGMMQSSSSFSSIPGNYLISKDSGAYDLGELDQAFFLYLDGQADPSSVQDQRQNSSSGMRPPTLNIFPSKPMHVEPSSSKAKANIELVSPQTSGSKRPSEPSMELANPRNETASAPQPPKPVKRESNRKGPTSSSEHEGPKTPDPKTLRRLAQNREAARKSRLRKKAYVQQLESSRIRLNQLEQELQRARTQGMFLGGGALLGGEQGLPVTMNTISTEAAMFDVEYARWQEEHHRIVCELRAAVQEHLPENELRLFVDNCLAHYDQVMNLKSLVAKTDVFHLVSGTWKTPAERCFMWIGGFRPSELIKIIVRQIEPLTEQQILGICGLQQSTQEAEEALSQGLEALNQSLSDTITSDSLSYPPNMANYMGQMAVAMNKLSTLEGFVRQADNQRHQTIHRLHQILTTRQAARCFLAIAEYFHRLRALSSLWLARPRQE

SEQ ID NO: 30560 - protein, 383 aa, Glycine max
  Clone ID: TF_GmC6275_4.pep
MNSASPQFVSSRRMSVYDPIHQISMWGEGFKSNGNLSAAMPLIDETDMKFDSQSEDASHGILGEPNKYDQEANKPTDKGDNDKYVSPAILDFEESVFNLDIQRRLAQNREAARKSRLRKKAYVQQLESSRLKLMQLEQELERARQQATKLQGIYIGGGLDSNHLGFAGSVNSGITTFEMEYGHWVNEQNRQITELRNALNAHIGDVELRILVDGMMSHYAEMFRMKSAAAKADVFYVMSGMWKTTAERFFLWIGGFRPSELLKVLGPLIEPLTEQQRLDIYNLGQSCQQAEDALSQGMDKLRQTLADSVAAGQFMEGTYIPQMTSAMDKLKALVSFVNQETLQQMSRILTIRQAARCLLALGEYFQRLRALSSLWSNRPREPA

SEQ ID NO: 30561 - protein, 64 aa, Glycine max
  Clone ID: TF_LIB4198-005-Q1-N1-F7.pep
KNRESAARSRARKQAYTTELEHKVSRLEEENEKLRRQQELEKMLSSNPPPEPRYQIRRTSSASF

SEQ ID NO: 30562 - protein, 381 aa, Glycine max
  unsure (1)..(381): unsure at all Xaa locations
  Clone ID: TF_GmC1880_2.pep
MDRDNKSPPPSSLYVKSSSSSFSHDDISAMPENPPKNRGHRRAHSEIITLPDDLSFDADLLPDDDNDLLSLYLQFDQLDSSSLPPPPPPPPPHNNINERSTRVRHQHSHSMDGSIHLEMLLSAASAADDVSGGIDTKKAMSADKLAELALVDPKRAKRIWANRQSAARSKERKMRYISELERKVQTLQTEXTSLSAQLTLLQRDTHGNDCXLKRVDCPIASMEQHVEIHMDXTDAFSELKLRLQTMEQQVHLQDALNDALKEEIQHLKALTGQVMPNGGPVNFASFGGGQQFYPNNQAMHTLLAAQKFQQLQIHSQKQQQHQLQQQQQFQHQLQQQQQFHQQQQQLQLQQQLQQQQQQQQQQQQQQTAATGTVTSTNGGHE

SEQ ID NO: 30563 - protein, 84 aa, Glycine max
  unsure (1)..(84): unsure at all Xaa locations
  Clone ID: TF_jC-gmro02910021c05d1.pep
QNPQIQTNPMASIPRPAAMDERKRKRMESNRESDXRSRMKKQKLLEDLSDVXSRLQGENVRLAQSIKAKEGAYVEIEAANDILR

SEQ ID NO: 30564 - protein, 284 aa, Glycine max
  Clone ID: TF_GmC1347_1.pep
MDELEETLLTQIDWESFLDDIPELNVDDFLQDDNAVPVVTDNHSSPNDDPVLSEIENMLMTQAENDAVVLPETPSSEAGYYKLFEEILVEEPKEGPVSPPSKIESEEGSDKDKTDDAASDEPMSKKLKRQLRNRDAAVRSRERKKLYVKNLEMKSRYLEGECRRLGHLLQCCYAENNALRLCLQLRGTYGASMTMQESAVLLLEPLLLGSLLWCMGIICHLSLPLMLWVAAVLPRENIEQKGLRRVTQKGSESKISECFQMQSFLKSRKSRASRTKMKFNFIVF

SEQ ID NO: 30565 - protein, 85 aa, Glycine max
  Clone ID: TF_GmC726_2.pep
PFPGADTDSVTVPQWQSYCLLISTLIPCMLNVCDMNLNRILHDQTSSSKKKKDSILREDPLTKRKVQKIQEAKGVCECNSYLIRL

SEQ ID NO: 30566 - protein, 151 aa, Glycine max
  Clone ID: TF_LIB4390-054-R1-K2-B7.pep
FEEILVEEPKEGPVSPPSKIESEEGSDKDKTDDAASDEPMSKKLKRQLRNRDAAVRSRERKKLYVKNLEMKSRYLEGECRRLGHLLQCCYAENNALRLCLQLRGTYGASMTMQESAVLLLGKACDCKLYYLLLPLLFCFGHSVETTTTLLD

SEQ ID NO: 30567 - protein, 146 aa, Glycine max
  unsure (1)..(146): unsure at all Xaa locations
  Clone ID: TF_LIB3138-098-P1-N1-A10.pep
PEFPVDPRVRPNGVQALQTLTMTNSSSAQQGAILQYAQTSDGQQILXPSNQVVVQTASGDMQTYQIRTTPSATSLPQTMVMTSPVTLTSQTTKTDDPQLKREIRLMKNREAARECRRKXKKEYVKCLENRVAVLENQNKTLIEELK

SEQ ID NO: 30568 - protein, 321 aa, Glycine max
  Clone ID: TF_GmC505_1.pep
MVGTIRLEQSEYIPREPREPSGSGADQETTNKDVNKMLRRLAQNREAARKSRLRKKAYVKQLESSRLKLMQLELEIGKARKQGLYMGTALDAGYIGSTSETINPGIVAFEIEYGQWVEEQERRNEELRHAFQTQAPGVQLNVVVQSVLNHYSNLFRMKAEAVKADVLYLLSGAWKPSVERIFLWIGGSRPSQLLNIIVPQLEPLTDQQIVSINNLRLSSQQAEDALSQGLEKLQQSLVHDMAVDPLGVGNLGLQMARTMEKFEALEGFVNQADHLRQQTLLHMSRILSIHQAARGLLALGEYFHRLRTLCSLWSARSCELA

SEQ ID NO: 30569 - protein, 232 aa, Glycine max
  unsure (1)..(232): unsure at all Xaa locations
  Clone ID: TF_GmC293864_1.pep
MATSNSRKSETSPSPSPTTNFIPIPAAPAPKTVDDVWREIVAGDRRECKEEAPDDDYDKEMMTLEDFLAKADQDQEPDYDNXQLKMPMPLTERLGSGTLFSFDHLPTTPFHDSAAAEGSVIGFGNGVEVVEGGRVKRRRPVLEQLDKAAQQRQRRMIXKNRESAARSRERKQAYQVELESLAVKLEEENDKLLKEKAERKKERYKQLMEKVLPIAQKQKPPCILRRARSLQW

SEQ ID NO: 30570 - protein, 460 aa, Glycine max
  unsure (1)..(460): unsure at all Xaa locations
  Clone ID: TF_GmC217_1.pep
MGSRSRTVNVXTTKDTDKVLNGMPSYAPPLPSSNSIAMEATNAHPSRISEFGTLEQSLGFRVEDTINLSRNPMFNQMKSNSQALGADIQFGALNKSIATSDINLSAAIAASQALVFQKDSQPTLASTSAGRENWGETNLADASPRTDTSTDDTEDKNQRPERGESSGSKDKSDQKTLRRLAQNREAARKSRLRKKAYVQQLESSRLKLTQLEQELQRARQQGIFISSTGDQAQSMSGNGAMAFDVEYARWLEEHNRQTNELRAAINSHAGDIELRTIVDNFMTQFDDIFRLKGIAAKADVFHILSGMWKTPAERCFMWIGGFRSSELLKLLESQLEPLTEQQLMGIYNLQQSSQQAEDALSQGMDALQQSLSETLANGSPSTSGSSGNVANYMGQMAMAMGKLGTLDGFLHQADNLRQQTLQQMLRILTTRQSARALLAISDYFSRLRALSSLWLARPRE

SEQ ID NO: 30571 - protein, 391 aa, Glycine max
  unsure (1)..(391): unsure at all Xaa locations
  Clone ID: TF_GmC420_1.pep
VSSQTISRVPVQVDSFDKLPTSLDKNPLTNQTEXQSLQLQKVQLSNLVSGDTEHQEESAMADASPRTDISTDVDTDDKNPRFDRSQSLVAVASDSSDRSKDKSDQKTLRRLAQNREAARKSRLRKKAYVQQLESSRLKLTQLEQELQRARQQGIFISNSGDQAHSMSGNGAMAFDVEYARWLEEQNRQINELRAAVNSHAGDTELRMIIDGIMAHYDEIFRLKANAAKADVFHLLSGMWKTPAERCFLWLGGFRSSELLKLLVNQLEPLTEQQLVGITNLQHGIXQAEDALSQGMEALQQSLSETLSTGSPGSSGSSGNVANYMGQMAMAMGKLGTLEGFIKQADNLRQQTLHQIHRILTTRQSARALLAIHDYFSRLRALSSLWLARPRD

SEQ ID NO: 30572 - protein, 159 aa, Glycine max
  unsure (1)..(159): unsure at all Xaa locations
  Clone ID: TF_jC-gmro02800043g12a1.pep
GSRLDNQFQVQSEDDTHGIFGTSVKYDQDTNRLTDKTQRRLAQNREAARKSRLRKKAYVQQLESCRVKLLQLEQEVDHAKQQGLYIGNGLGSNNLGFAGSVNSRITLFKMEYGNWVEEQNRQILELRTAXSSHIGDIQLGTLVQGIMNHYTXLFGMKSA

SEQ ID NO: 30573 - protein, 252 aa, Glycine max
  Clone ID: TF_GmC107_2.pep
MGKYDKYDVEKHRDANVSGDDAFARLYASVDADIVALLQKAESASKEKGKASAVAINAEIRRTKARLLEEVPKLQRLAVKKVKGLSSQEFAARNDLVLALPDRIQAIPDGAPPVPKQTGGWAASASRPEIKFDSDGRFDDEYFQQSEQSSQFRQEYEMRRMKQDQGLDVIAEGLDTLKNMAHDMNEELDRQVPLMDEIDTKVDKASSDLKNTNVRLKDTVNQLRSSRNFCIDIVLLIIILGIAAYLYNVLKK

SEQ ID NO: 30574 - protein, 196 aa, Glycine max
  unsure (1)..(196): unsure at all Xaa locations
  Clone ID: TF_GmC128657_1.pep
MQAREITGLNYLLPSDPCPYPGHYSMVQNTIPTFQLHKLSNQFYGLQKPPPKVLADFSPPQSSCISSNSTSDEADEQQQSLINERKHRRMISNRESARRSRMRKQKHLDELWSQVVWLRNENHXLMDKLNHVSESHDKVAQENVQLREEASELRQMICDMQLHSPYHPPPLSPIDDDVSPYVKSDSSITDSLDLLG

SEQ ID NO: 30575 - protein, 382 aa, Glycine max
  Clone ID: TF_GmC6275_3.pep
MNSASPQFVSSRRMSVYDPIHQISMWGEGFKSNGNLSAAMPLIDETDMKFDSQSEDASHGILGEPNKYDQEANKPTDKGSNMIQRRLAQNREAARKSRLRKKAYVQQLESSRLKLMQLEQELERARQQGIYIGGGLDSNHLGFAGSVNSGITTFEMEYGHWVNEQNRQITELRNALNAHIGDVELRILVDGMMSHYAEMFRMKSAAAKADVFYVMSGMWKTTAERFFLWIGGFRPSELLKVLGPLIEPLTEQQRLDIYNLGQSCQQAEDALSQGMDKLRQTLADSVAAGQFMEGTYIPQMTSAMDKLKALVSFVNQFFGLRVLLKLFEAIDLADHLRQETLQQMSRILTIRQAARCLLALGEYFQRLRALSSLWSNRPREPA

SEQ ID NO: 30576 - protein, 355 aa, Glycine max
  Clone ID: TF_GmC486_1.pep
MGLPSTQTSTGSKRQPETSMAKPNPHTEAPSAPEPPKAVKREGNRKGTTSSSEQEAPKTPDPKTLRRLAQNREAARKSRLRKKAYVQQLESSRIKLNQIEQELQRSRAQGILMGGNTLLGGEQGFPMAMSGISSEAAMFDVEYARWLEEHHRIVCELRAVLQEHLHENELRLYVDNCLAHYDQVMNLKSMVAKTDVFHLVFGVWKTPAERCFMWIGGFRPSELIKIILGQIEPLTEQQILGICGLQQSTQEAEEALSQGLDALNQSLSETITSDSLWCPPNMTNYMGQMAVAINKLSTLESFVRQADNLRHQTIHRLHQLLTTRQAARCLVAISEYFHRLRALSSLWSTRPRQDQ

SEQ ID NO: 30577 - protein, 386 aa, Glycine max
  unsure (1)..(386): unsure at all Xaa locations
  Clone ID: TF_GmC299_1.pep
MDRVFSVDDISDHFWQPPIPVSAAQTSSQMSRSASEWAFQRFLQEASASAPSPPSSSSAADVVFVEIEDQPKPAPPPPSNGAVLPNAPGPVPLDSDEYQAFLKSKLNLACAAVAMTRGSLAKSQDPSPFSEGSIPSENDPSKLQDKDTNVPVGIPSIPAMQKKPAVAIRPSTSGSSREQSDDEDIEGETSMNATTDPPIVKRVRRMLSNRESARRSRRRKQAHLTDLEXTQVSQLRSENSTLLKRLTDVSQKYSDSAVDNRVLKADVETLRTKVKMAEETVKRITGLNPLLHAMSDISSLGLPSFDGRSPSDTSADAAVPVQDDPHHHFYQPTSTNPIPSHDPIVNNGLGGISSIENVQQNAAVVLGGNKMGQTASLQRVASLEHL

SEQ ID NO: 30578 - protein, 82 aa, Glycine max
  Clone ID: TF_GmC1611_1.pep
NSRKGAGYTSVKPLDAKTLRRLAQNREAARKSRLRKKAYVQQLESSRLKLTHLEQDLQRARSQDEFMGCGGAGGSISSGEFN

SEQ ID NO: 30579 - protein, 227 aa, Glycine max
  Clone ID: TF_GmC80973_1.pep
MNSTKQKNRSWDSFSNAMTNPVGVPSGKDSAAFQSSGLQCTPHEADALPPAASEKHDSVELGLQDAKSFPEKKDISHAKSSASETDTKRAKQQFAQRSRVRKLQYIAELERNVQALQAEGSEVSAELEFLNQQNLILSMENKALKQRLENIAQEQLIKYLEQEVLEREIGRLRALYQQQQQPPQTQPQQQPSGSHRRSNSRELESQFANLSLKHKDTNSGQDPALRI

SEQ ID NO: 30580 - protein, 221 aa, Glycine max
  Clone ID: TF_LIB4280-018-R1-K1-F1.pep
MATQTQDPRSNPNPNPNAMSATPSSSFFIRAAGGNGPSAAPVAGSGESHSHHRRAHSEVSFRLPDDMIDLSPSDPFNGGSSTASFEEIGSEDDLFSTYIDVEKLGAGRGGNGSDQSGYGNGAGSSCYNDGEKSPSTAAARPRHRHSSSVDGSTSTSMFGEIMDAKKAMPPDKLAELWNIDPKRAKRILANRQSAARSKERKARYIQELERKVQTLQTEATT

SEQ ID NO: 30581 - protein, 72 aa, Glycine max
  unsure (1)..(72): unsure at all Xaa locations
  Clone ID: TF_LIB3242-186-Q1-J1-C6.pep
RILSNRESXILSRMRNQAHLTDLDTQVSQLRTENSSVIKQLTDVSHKYNNTAFYNRILNTDVATLITNVKIC

SEQ ID NO: 30582 - protein, 100 aa, Glycine max
  unsure (1)..(100): unsure at all Xaa locations
  Clone ID: TF_LIB3056-014-Q1-N1-C12.pep
RADYVREWTALDSQSTGRYTSASGGEVVRTAXRMHTRLILNKESAARSQSXXQAYAHELEIKVSRLEDANVRIKRLNEMESALTSVPTAEPRPKLQLIRT

SEQ ID NO: 30583 - protein, 217 aa, Glycine max
  Clone ID: TF_GmC2191_1.pep
IANCAVGSPVSANKPEGRENHTKGATSGSSEPSDEDDEAGACEQSTNPADMKRLRRKVSNRDSARRSRRRKQAQLSDLELQVEKLKVENATLYKQFTDASQHFREADTNNRVLKSDVEALRAKVKLAEDMVTRSSFTTLNNQLLQTQHHQMSTPQQLNTTNLRRMAHVSPTITVHGNDVSYNNGGQNSALGNLDMSFNDINEVMNDAMSCGTIWPLD

SEQ ID NO: 30584 - protein, 115 aa, Glycine max
  unsure (1)..(115): unsure at all Xaa locations
  Clone ID: TF_jC-gmXLIB3563P051cd04a1.pep
MNSASPQFVSSRRMSVYDPIHQISMWGEGFKSNGNLSAAMPLIDETDMKFDSQSEDASHGILGEPNKYDQEANKPTDKIQRRLAQNREAARKSRLRKKAYVQQXESSRLKLMQLE

SEQ ID NO: 30585 - protein, 228 aa, Glycine max
  unsure (1)..(228): unsure at all Xaa locations
  Clone ID: TF_GmC420_3.pep
WCVWSRAGVCVEDEKGTARGMPSFDSQLPNSNACYTEGSAIDSFCVFDFDQSVGYRIEDCVALRGNSVFDSLKVSSQTISRGPVEVDSFDKLPTSLNKNPLTSQTERQRLQLQKVQLSNLVSGDTEHQEESAMADASPRTDISTDVDTDDKNPRFDRSQSLVAVVSDSSDRSKDKSDQKTLRRLAQNREAARKSRLRKKXYVQQLESSRLKLTQLEQELQRARQQGNH

SEQ ID NO: 30586 - protein, 91 aa, Glycine max
  unsure (1)..(91): unsure at all Xaa locations
  Clone ID: TF_GmC76867_1.pep
MDERKRKPMESNRKSARRSRMKKQKLLEDLTDXRRKHMLRWKLRMILRAQTMELVGWLRFLNSILEIADEVGSGGESFEILQILNSLLMPW

SEQ ID NO: 30587 - protein, 111 aa, Glycine max
  Clone ID: TF_LIB3056-004-Q1-N1-G6.pep
MNSASPQFVSSRRMSVYDPIHQISMWGEGFKSNGNLSAAMPLIDETDMKFDSQSEDASHGILGEPNKYDQEANKPTDKIQRRLAQNREAARKSRLRKKAYVQQLESSRLKL

SEQ ID NO: 30588 - protein, 337 aa, Glycine max
  unsure (1)..(337): unsure at all Xaa locations
  Clone ID: TF_GmC114277_2.pep
MDATSSQFVSSRRMGVYDPIHQISMWEETFKSNDTNNLTVSTSIIGEVEMKLDNQVHVQSEDASHGIFGTSVKYDQDANRLTDKPRTQRRLAQNREAARKSRLRKKVXKAYVQQLESCRLKLVQLEQEVDHAKQQATKLQGLYIGDGLGSNNLGFAGSVNSGITLFKMEYGNWLEEQNRQILELRTALSSHIGDIQLGTLVQGIMNHYTKLFSMKSAAAKADVFYVMSGMWKTTAERFFLWIGGFRPSELLKVLVPLREPLTEQQRFDAYGLEKSCQQAEDALSQGMEKLQQMLADSVGPGQLVEGTHIPQMDTAMERLEALVSFVNQEKERKFSQG

SEQ ID NO: 30589 - protein, 191 aa, Glycine max
  Clone ID: TF_GmC667331_1.pep
MSLPRPSEGKAPSQLKEGVAPAAAAASSSSSWNNRLHTFPPLSLHNKSSKIEDSDEDMFTVPDVETTPVSVHSAATLQNSNLTQRNVTDPQFQTGFPGKRRRGRNPADKEHRRLKRLLRNRVSAQQAREREKVYVNDLESRAKELQDKNAILEERISTLINENTMLRKVLMNARPKTDDSIEQKQDQLSKS

SEQ ID NO: 30590 - protein, 418 aa, Glycine max
  unsure (1)..(418): unsure at all Xaa locations
  Clone ID: TF_GmC383_1.pep
MGSSDMDKTPKEKESKTPPATSQEQSSTTAMPTTNPDWSNFQTYSPIPPQGFLASSPQAHPYMXGVQHYMPSYGTPPHPYVAMYPHGGIYAHPSIPPGSYPFXSPFAMASPNGIADASGNAPGRIEVGGKPPEVKEKLPIKRSKGSASGGNLNMWITGKNNEPGKIPGESANGIHSKSGESASDGTSEGSDENSQNDSQLKSRERQDSFEDEPSQNGSSVHAPQNGVHNRPQTVVNQTMSILPISTTSAPGAVPGPTTNLNIGMDYWGTPTSSTIPALHGKVPSTAVAGGMIAAGSRDGVQSQVWLQDERELKRQRRKQSNRESARRSRLRKQAECDELAQRAEALKEENATLRSEVSQIRSEYEQLRSENAALKERLGDIPGVATPGKEDLRSGQNDQHVSNDTQQSGQTEVVQGVH

SEQ ID NO: 30591 - protein, 387 aa, Glycine max
  Clone ID: TF_GmC754_1.pep
MVIEEGEMKSQGEVESWLQQEAKKNHHSPLFSSSSYLGRQTSSIYSLTLDEFQHSLCESGKNFGSMNMDEFLSSIWNAEENSQAITNNNVPLSSTLTILRKQPSLPRQPSLSLPAPLCRKTVDEVWSQIQKEQNKNNNISNVLNDNTESAPRQPTFGEMTLEDFLVKAGVVRETTCAPPLPVSHSHQPHYANNNNNVAMAPSFVGRHVGAVSNVVAPGYQQVVGEASGGYGKRDHNGGGYHCFGGGGGGYGVGPTMGMGGPVSPANSSDGIGNDGGQFGLDMGGLRGRKRVVDGPVEKVVERRQRRMIKNRESAARSRARKQAYTVELEAELNQLREENSQLKQALAELERGRKQQCFEEVNVSVKTKAQKAKEKLRALRRNMSCPL

SEQ ID NO: 30592 - protein, 214 aa, Glycine max
  Clone ID: TF_GmC299_3.pep
KAFILFSSGTGTNSALFNLKPNNLSFRMLSNRESARRSRRRKQAHLTELETQVSQLRSENSSLLKRFTDVSQKYNNAAVDNRVLKADVETLRTKVKMAEETVKRITGLNPMLHAITEMSSMAMPSFDESPSETSADAAVSVQEDPNHHRCQPTSNNGLGGISSIETVQQNVAAVVGGNKTGRTTSLHRVASLEHLQKRIRGGADSRGPPSNGEQ

SEQ ID NO: 30593 - protein, 120 aa, Glycine max
  Clone ID: TF_GmC609_3.pep
IGMDLWNASSGGAEAAKMRHNQSGAPGVALGDQWVQDERELKRQKRKQSNRESARRSRLRKQAECEELQKRVESLGGENQTLREELQRLSEECEKLTSENNSIKEELERLCGPEAVANLD

SEQ ID NO: 30594 - protein, 122 aa, Glycine max
  Clone ID: TF_GmC143038_1.pep
TTTTHSVSVSSFLNQPLSTFLTLTSTSSSSSVFHKHDHSLLSVSDPNTLQDQRHTRVIKNRESAVRSRARKQAYRKGLEVEISRLTEENSRLKRQLKELQRCLCSSHTPRMAAPCRTSSSPF

SEQ ID NO: 30595 - protein, 152 aa, Glycine max
  Clone ID: TF_GmC535_1.pep
MASIPRPASSGSSEGGGDPAAMDERKRKRMESNRESARRSRMKKQKLLEDLSDVASRLQGENVRLAQSIKAKEEAYVEIEAANDILRAQTMELADRLRFLNSILEIADEVGGGGESFEIPQIPDPLFMPWQIPHPMMASPDMLLHGNQGLFA

SEQ ID NO: 30596 - protein, 136 aa, Glycine max
  unsure (1)..(136): unsure at all Xaa locations
  Clone ID: TF_GmC535_2.pep
MASIPRPASSGSSEGGGDPAAMDERKRKRMESNRESARRSRMKKQKLLEDLSDVASRLQGENVRLAQSIKAKEEAYVEIEAANDILRAQTMELADRLRLLNSILEIADEVDGGGXSFEIPQIPDPLFMHWQIPHPM

SEQ ID NO: 30597 - protein, 173 aa, Glycine max
  unsure (1)..(173): unsure at all Xaa locations
  Clone ID: TF_GmC6275_5.pep
MNSASPQFVSSRRMSVYDPIHQISMWGEGFKSNGNLSAAMPLIDETDMKFDSQSEDASHGILGEPNKYDQEANKPTDKIQRRLAQNREAARKSRLRKKAYVQQLESSRLKLMQLEQELERARQQGIYIGGGLDSNHLGFAGSVNSGITTFEMEYGHWVNEQXTITELRNALML

SEQ ID NO: 30598 - protein, 517 aa, Glycine max
  Clone ID: TF_GmC853_1.pep
FAESVEGVEQRKSSISGGPVLRPPNQKHGIPPSHPNINISPSATPCSRYSQRLRSPGSSHSRSLSQSPIFSLDSLPPLSPSPAAVTSMFDSISTTDMSVEESNVSSQVPLNGGHALLPPRKGHRRSSSDSPLGISGFMQSSPVPSGGESSGFEKPIQLVLKASFRDSLDGGHANEPVNGRKEEAADDLFREYMNLDNFDNLNFPGMEDKDLDSRTSGSKTVESSDNEVESHVNGKASGAQGASSSCSEERREGVKRSSNGEVAPGSRHRRSFSLDSSIGNFNIEDGLPKLPPSKNQMGQHSPSNSMDGKMSETSTEFGNGEFSAEEVKKIMESDKLAEIASTDPKRAKRILANRQSAARSKERKMRYIAELEHKVQTLQTETTTLSTQFTKLQRDNSDLKSENNECKLRLQAMEQQSLLKDALNETLDAEVRRLRRAVAELGGESLTSCMARQLAINQQMFELQHQQPSQQRHFLLQNHHTQEEIESRSQQIQGNELHPQAQIQSQQIQRNELHPQP

SEQ ID NO: 30599 - protein, 341 aa, Glycine max
  Clone ID: TF_GmC609_7.pep
MGTGEESTAKVPKPSSTSSIQIPLAPSYPDWSSSMQAYYAPGATPPAFFASNIASPTPHSYMWGSQHPLIPPYSTPVPYPAIYPPGNVYAHPSMAMTLSTTQNGTEFVGKGSDGKDRVSAKSSKAVSANNGSKAGNNGKASSGPRNDGTSTSAESGSEGSSDASDENTNQQESATNKKGSFDQMLVDGANARNNSVSIIPQPGNPAVSMSPTSLNIGMNLWNASPAGDEAAKMRQNQSSGAVTPPTIMGREVALGEHWIQDERELKKQKRKQSNRESARRSRLRKQAECEELQKRVESLGSENQTLREELQRVSEECKKLTSENDSIQGRVRTIVWTRSSC

SEQ ID NO: 30600 - protein, 149 aa, Glycine max
  Clone ID: TF_GmC1648_1.pep
MACSSGTSSGATSSMLQNNSGSEEELQALMEQRKRKRMISNRESARRSRMRKQKHLDDLASQVTQLRNENHQILTSVNLTTQNHKYLAVEAENSVLRAQVNELSHRLDSLNQIIHLLNFFEPDASTSTFFNNPFNFSLPIMASADMLQY

SEQ ID NO: 30601 - protein, 282 aa, Glycine max
  unsure (1)..(282): unsure at all Xaa locations
  Clone ID: TF_GmC217_2.pep
NREAARKSRLRKKAYVQQLESSRLKLTQLEQELQRSRQQGIFISSTGDQAQSMSGNGAMAFDVEYARWLEEHNRQTNELRAAINSHAGDIELRTIVDNFMTQFDDIFRLKGIAAKADVFHILSGMWKTPAERCFMWIGGFRSSELLPREKFLLSIQLEPLAEQQLMGIYNLQQSSQQTEDALSQGMDALQQSLSETLANGSPSSSGXSGNVANYMGQMAMAMGKLGTLEGFLHQADNLRQQTLQQMLRILTTRQSARALLAISDYFSRLRALSSLWLARPRE

SEQ ID NO: 30602 - protein, 370 aa, Glycine max
  Clone ID: TF_GmC114277_1.pep
MDATSSQFVSSRRMGVYDPIHQISMWEETFKSNDTNNLTVSTSIIGEVEMKLDNQVHVQSEDASHGIFGTSVKYDQDANRLTDKTQRRLAQNREAARKSRLRKKAYVQQLESCRLKLVQLEQEVDHAKQQATKLQGLYIGDGLGSNNLGFAGSMEYGNWLEEQNRQILELRTALSSHIGDIQLGTLVQGIMNHYTKLFSMKSAAAKADVFYVMSGMWKTTAERFFLWIGGFRPSELLKVLVPLSEPLTEQQRFDAYGLEKSCQQAEDALSQGMEKLQQMLADSVGPGQLVEGTHIPQMDTAMERLEALVSFVNQADHLRQETLRQMYRILTTRQTGRFLLDLGEYFQRLRALSKLWANRPQELTKSVIKH

SEQ ID NO: 30603 - protein, 78 aa, Glycine max
  Clone ID: TF_GmC322_1.pep
HSSVAGVNARKRDKPLPPIVIDDPSDIVAMKRARNTLAARKSRERKAAKLEELEDKIAKLEAERDHWKRIALAQTGMQ

SEQ ID NO: 30604 - protein, 169 aa, Glycine max
  Clone ID: TF_jC-gmst024169c09b1.pep
HASGRDIQSAGGGGGGRQPSMGEMTLEDFLSRAGVAVDAAPHWMHQYPQQQQQYALPRPLPLPGPALDAAYHGDRPGVFLSHSQVAGRKRAATAAVAGDGVVERTVERRQKRMIKNRESAARSRARKQAYTNELENKVARLEEENKRLIELKVLKPLEPLEPPPAEQNK

SEQ ID NO: 30605 - protein, 159 aa, Glycine max
  Clone ID: TF_GmC137634_1.pep
APGGGVQSLSVQGGGIGGMVGLAPGSVHVATGSPAANQLSSGDRIGKSNGDTSSVSPVPYVFNGGLRGRKSGGAVEKVIERRQRRMIKNRESAARSRARKQAYTMELEAEVAKLKEENEELQKKQAEIMEIQKNQVKEMMNLQREVKRRRLRRTQTGPW

SEQ ID NO: 30606 - protein, 385 aa, Glycine max
  unsure (1)..(385): unsure at all Xaa locations
  Clone ID: TF_GmC1880_1.pep
MDNRDNKSPPPLPPSSSRYVKSEQQASLSASSSFSHDDISGMPENPPKNXGHRRAHSEIITLPDDLTFDVDLPDDNDLLSIYLQFDQLDSSPLPLPPPGSSNSIANNNNNNNNKNNNNNNERPTRVRHQHSLSMDGSIHPDMLLSATAAAADDVSGGGIDTKKAMSADKLAELALVDPKRAKRIWANRQSAARSKERKMRYISELERKVQTLQTEATSLSAQLTLLQRDTTGMTAENSELKLRLQTMEQQVHLQDALNDALKEEIQHLKALTGQVMPNGGPVNFASFGGGQQFYPNNQAMHTLLAAQKFQQLQIHSQKQHQLQQQQQFQQQQQFQQLQQLQLQQQQQLQLQQQQQQQQQQQQQQQQQQQQQQQLQLQQQQQQQEQ

SEQ ID NO: 30607 - protein, 196 aa, Glycine max
  Clone ID: TF_GmC299_5.pep
MQFHHYYYEVLSNRESARRSRRRKQAHLTELETQVSQLRSENSSLLKRFTDVSQKYNNAAVDNRVLKADVETLRTKVKMAEETVKRITGLNPMLHAITEMSSMAMPSFDESPSETSADAAVSVQEDPNHHRCQPTSNNGLGGISSIETVQQNVAAVVGGNKTGRTTSLHRVASLEHLQKRIRGGADSRGPPSNGEQ

SEQ ID NO: 30608 - protein, 227 aa, Glycine max
  Clone ID: TF_GmC1081_2.pep
QSGHFTARNKFQQEGDSGSLIMLKGDIGEKPRPIGIIWGGTANRGRLKLKVGQPPENWTSGVDLGRLLNLLELDLITTDEGLQVAVQEQRAVSATVIGSTVGDSSPPDGVLPKDKAEDKYEPLGLQIQSIPLGVVPSSQDMKPSIMETEFKLEDGIKVGPSIEHQFIPSFIGRSPLHKNSIQDRTATENLSSLRNNCDEDLCVSLQLGDNEAKRRRSEASTSTEEPQ

SEQ ID NO: 30609 - protein, 198 aa, Glycine max
  Clone ID: TF_GmC749653_1.pep
MVPSEIRGVHYLAPENPFLVPPNFSLLQSDIPNLHLNTLLSNFPNCHFPPSGHEFVVPPSSCLSSNSTSDEADEIQFNIIDERKHRRMISNRESARRSRMRKQKHLDELWSQVVRLRTENHNLIDKLNHVSESHDRVLQENARLKEEASALRQMLADMQIGTAFACTMEDLEDLPCNTSQLKPDPLNQSITPADMIHE

SEQ ID NO: 30610 - protein, 426 aa, Glycine max
  unsure (1)..(426): unsure at all Xaa locations
  Clone ID: TF_GmC1716_1.pep
MGNSEEEKSVKTGSPSSSPATTEQTNQPNIHVYPDWAAMQYYGPRVNIPPYFNSAVASGHAPHPYMWGPPQPMMQPYGPPYAAFYSHGGVYTHPAVAIGPHSHGQGVPSSPAAGTPSSVESPTKLSGNTDQGLMKKLKGFDGLAMSIGNCNAESAERGAENRQSQSVDTEGYSDGSDGNTAGANQTKRKRSREGTPTTDAEGKTELQNGPASKETASSKKIVSATPASVAGTLVGPVVSSGMATTLEXLRNPSTVHSKANSTSAPQPCAVVRNETWLQNERELKRERXRKQSNRESARRSRLRKQAETEELARKVEMLTAENVSLKSEITRLTEGSEQMRMENSALREKLINTQLGQREEITLSSIDSKRAAPVSTENLLSRVNNSGSNDRTAENENDICENKPNSGAKLHQLLDTNPRANAVAAG

SEQ ID NO: 30611 - protein, 168 aa, Glycine max
  Clone ID: TF_GmC306390_1.pep
MLSLPPSDPFSTFSAGFTPWDHDEDSHALFSPKPVSSSSGSDDKSEPNQHVSASSTAMEERKRRRMISNRESARRSRMRKQRHLENLRNQLNKCRVENRELSNRLQFVLHHLNRLRTENEWLHSERTLLRQKVANLTQILIFQQFQTFSPAWTCTNNNTSLMTINQVN

SEQ ID NO: 30612 - protein, 134 aa, Glycine max
  Clone ID: TF_GmC535_3.pep
TAARRRQKGKRMESNRESARRSRMKKQKLLEDLSDVASRLQGENVRLAQSIKAKEEAYVEIEAANDILRAQTMELADRLRFLNSILEIADEVGGGGESFEIPQIPDPLFMPWQIPHPMMASPDMLLHGNQGLFA

SEQ ID NO: 30613 - protein, 214 aa, Glycine max
  Clone ID: TF_GmC2191_3.pep
ARAANKPEGRENRTKGATSGSSEPGDEDDEAGACEQSTNPADMKRLRRKVSNRDSARRSRRRKQAQLSELELQVEKLKVENATLYKQFTDASQHFREADTNNRVLKSDVEALRAKVKLAEDMVTRSSFTTLNYQLLQTQQHQMSTPPQLNTTNLRRMAHVSPTITVHGNDASYNGVTVGEQNSSALGNLDMTFNNINNGVMNNAMSCGTIWPLD

SEQ ID NO: 30614 - protein, 160 aa, Glycine max
  Clone ID: TF_GmC1471_2.pep
MASSSGTSSGSSLLQNSGSEEDLQAVMDQRKRKRMISNRESARRSRMRKQKHLDDLVSQVAQLRKENQQILTSVNITTQQYLSVEAENSVLRAQVGELSHRLESLNEIVDVLNATTVAGFGAAATSSTFVEPINNNSFFNPLNMGYLNHPIMASADILQY

SEQ ID NO: 30615 - protein, 113 aa, Glycine max
  Clone ID: TF_GmC1471_4.pep
MASSSGTSSGSSLLQNSGSEEDLQAVMDQRKRKRMISNRESARRSRMRKQKHLDDLVSQVAQLRKENQQILTSVNITTQQYLSVEAENSVLRAQVGELSHRLESLNEIVDVLN

SEQ ID NO: 30616 - protein, 336 aa, Glycine max
  Clone ID: TF_GmC609_2.pep
MGTGEESTAKVPKPSSTSSIQIPLAPSYPDWSSSMQAYYAPGATPPAFFASNIASPTPHSYMWGSQHPLIPPYSTPVPYPAIYPPGNVYAHPSMAMTLSTTQNGTEFVGKGSDEKDRVSAKSSKAVSANNGSKAGDNGKASSGPRNDGTSQSAESGSEGSSDASDENTDQQESATNKKGSFDQMLVDGANARKNSVSTIPHSSVPGNPAVSMSPTSLNIGMDLWDASPAGAEAAKMRHNQSSASEAVTPPTIMGREVPLGEQWIQDDRELKKQKRKQSNRESARRSRLRKQAECEELQKRVESLRSENRTLREELQRVSEECKKLTSENDSIKVIQ

SEQ ID NO: 30617 - protein, 200 aa, Glycine max
  Clone ID: TF_GmC6779_2.pep
HASVKSGGWQDSFEDEPSQNGSLAYTAQNGGLNTPHTVVNQTMSIIPISAGGPTRPYGCEKTTEGIGMDYWGTPASSNIPALGRKVPSTAVAGGMVTVGSRDSAQSQLWLQDEREPKRQRRKQSNRESARRSRLRKQAECDELAQRAEALNEENASLRSEVNRIRSDYEQLVSENSPLKERLGELPANDDHHRSCRNDQH

SEQ ID NO: 30618 - protein, 330 aa, Glycine max
  Clone ID: TF_GmC1711_1.pep
MNQKFIGKPPATVDLDRMPERGSHHRRSHSDTSFRFAANFDDLLLFDPSDFDISGLPSPLPLPSPVSAGLVPMSVDSDESGKQPRPAGASAGGHLRSLSVDSDFFDGLGFGGDERGAGKGGGGERRVGHHRHSNSMDGSSTTSFEADSAMIMDGVKKAMAPDKLAELALMDPKRAKRILANRQSAARSKERKIRYTSELERKVQTLQTEATNLSAQLTMLQRDTTDLTTENKELKLRLEALEQEAQLREDLNEALKEELQRLRAQSTRLGAIGGNPSFGGIFNQLASQLAMQQLSNSAPHQQTQHQPQVGMPPPPSGQNHPNFMDFNQQK

SEQ ID NO: 30619 - protein, 489 aa, Glycine max
  Clone ID: TF_GmC726_1.pep
DARSENLVESLSAQERLGSPNLSPASSHSRSLSQPSFFSLDSLPPLSPSPYKEPSFSDSISTDVSAEESLPTSHAPLPNRGHALQLGHSLPPRKGHRRSNSDSPLGIADFIQSAPQYDTCGTWSYCENNAYRGGNSGFEKPIQLVLKEPIKDMDRVDGFGGEPMVGRKEDDALDDLFSAYMNLDNIDGLNFSGMEDKDLDSRTSGSKTVESSDNEVESHANGKVTGSQGASSRCSEERREGVKRSSNGDVAPGSRHRRSFSLDSSIGNFHIGDESPKLPPSQNRFGQHSPSSSIDGKTSETSMEFGNGEFSSEELKKIKENDKLAEIAMADPKRAKRILANRLSAARSKERKMRYISELELKVQTLQTETTTLSTQFTKLQMDNSELKSENNEYKLRIQALEQQSQLKDALNETLDAEVRRLRRTVAELGGESLLSSRMAQQLAISQQVFQLQHQQHPNQLRHVQLDNSHSQEQTQTQSQCHNGKATAY

SEQ ID NO: 30620 - protein, 150 aa, Glycine max
  Clone ID: TF_GmC463_1.pep
MASPIQQQQRSTTTSSGSEGGDPHIIDERKRKRMLSNRESARRSRMRKQKQLEDLTDEVSRLQSANKKLAENIEAKEEACVETEAANSILRAQTMELADRLRFLNSILEIAEEVEGLSVEIPEIPDPLLKPWQIPHPIQPIMATANMFLR

SEQ ID NO: 30621 - protein, 406 aa, Glycine max
  Clone ID: TF_1905784.pep
SSEWAFQRFLQEATAAGTSTSSPPQPPTMTASSSSSSHQNDVVEIKDENLSIPNLNPSTALNSKPASSFGLAPPPNIAVDSEEYQAFLKSQLHLACAAVALTRGKSLNPQDSGSTAHDKGSETASAAQSGSHVSTLGSGQEVAKIQDKDAGGPVGIPSLPPVQKKPVVQVRSTTSGSSREQSDDDEAEGEAETTQGMDPADAKRVRRMLSNRESARRSRRRKQAHLTELETQVSQLRVENSSLLKRLTDISQKYNEAAVDNRVLKADVETLRTKVKMAEETVKRVTGLNPLFQAMSEISSMVMPSYSGSPSDTSADAAVPVQDDPKHHYYQQPPNNLMPTHDPRIQNGMVDVPPIENVEQNPATAAVGGNKMGRTTSMQRVASLEHLQKRIRGEVSSCGTQGRGEQ

SEQ ID NO: 30622 - protein, 174 aa, Glycine max
  Clone ID: TF_6913416.pep
HQDALSNDSNSSTNYSSKYSPDYTDNIDNQSGIDRRSEDDVARHTAITPILKKNITKFYEPLVDNNTVYNYEDDPVEYKKARKRIQNRESASRVRSKKRNYVGDLEVEMNMIKKENADLKVKNAALKAENNLLKQQTCFLEKMIMKTGPQSITNTPANNVEQNQECLLPLVNKA

SEQ ID NO: 30623 - protein, 774 aa, Glycine max
  Clone ID: TF_GmC470_1.pep
MTESMPAVEPSPEPPASDIVFDDFSTDFSAFPIPSMDSLFNTTDGLPFPSDLEFGMDFNNNNGEFEITFDDLDDIYIPSDAEDFLLPDACNPNYASVSPPIDDSSAKNSDSDASAVSGDGVSRFFNSQVSESDSADNVRVPSVPSPEAEFCEREESSNGPVSSQGSGNGGSGVYEAMHSPSPDSGPYERDITSFHAHAATNNGVKMEEVPAFDLKRKKGSCEGSATKHRRFSSSVENNNNNTEKQSQSGLNGIDDEDEKRKARLMRNRESAQLSRQRKKHYVEELEEKVRSLNSIIADMSSKMSYVVAENATLRQQVGAAAGVMCPPPPAPAPGMYPHHPPMAPMPYPWMPCAPYVVKPQGSQVPLVPIPRLKPQQPASAPKSKKSESKKSEGKTKKVASISLLGLFFFIMLFGGLVPVVDFRFGGLVDNVPGTGSSNYVSDRVYGHGGGKVWSLNGPRNGSGRDGDVGFSNGRFSVSDRVKNYEKRGRNLREERHDRKGPDDSSRQGNASEPLVASLYVPRNDKMVKIDGNLIIHSIMASEKAMASQTAEAKKDKRETGLAIPKDLDSALAIPGVGRSRDQHPHVYRVSPEQRKALGSGSTKALKDHMKSSATDGKMQQWFREGLAGPMLSSGMCTEVFQFDASPSPGAIVPATSVANVSTENHQNATSVKKTRNRRTLHELPEPLNGSSLNITEEQVKNLQKDHFHGNKSSMVVSVLVDPREAGDGDVDVDGMMRPKSLSRIFVVVLIDSVKYVTYSCGLPRASPHLVTGYV

SEQ ID NO: 30624 - protein, 198 aa, Glycine max
  Clone ID: TF_GmC9561_1.pep
MDDILKSFSPKSVDDVWNDIVTGATVHDAVSATATDYADAAMTLEDFLTKAVTEEDVRGAPPPPPPPPPSSFLPFPADGSSSSVEPFANGVSAAPSNSVQKGKRRAVEEPVDKATLQKQRRMIKNRESAARSRERKQAYTSELEYLVHQLEQENVQLLNEEAEMRRQRKKQLFECIIPIEVMPKPKKKLRRVNSAQSL

SEQ ID NO: 30625 - protein, 232 aa, Glycine max
  Clone ID: TF_GmC299_4.pep
DPTREGLVGCDPPSEKGDIEGETSMNDNTDPADVKRVRRMLSNRESARRSRRRKQAHLTDLETQVSQLRGENSTLLKRLTDVSQKYSDSAVDNRVLKADVETLRAKVKMAEETVKRITGLNPMPHAMSDISSLGLPSFDGRSPSDTSADASVPVQDDPHHHFYQPTLNNPIPSHDPIVNNGLGGISSIENVQQQNAAAVVGGNKIGQTASLQRVASLEHLQKRIRGGPPSEQ

SEQ ID NO: 30626 - protein, 240 aa, Glycine max
  Clone ID: TF_GmC311753_1.pep
MDDGNAELSDKLSDNNVLFLNPESCSSFQASSSSRTCTHTHTCNPPGPDAAHTHTCYHTHTQVFAPEDDGRKHSNSKQKRPSGNREAVRKYREKKKAHTAYLEEEVKKLHMVNQQLVRKLQGQALLEAELARLRSILARLRGKIDSELGAWPFQKQYCNTSYIFKEGDAGLECQKNNLPCFHPHVGSSSQVNICACGKSMIPLDGNCQPEMVDCQVDANNMTSTEGQTVDNIMSSASQDG

SEQ ID NO: 30627 - protein, 214 aa, Glycine max
  Clone ID: TF_GmC128657_2.pep
MQTKEVVSSLSYLLPSNPCSYPPSNNYTSMIQNSIPTFQFQRFSNQIYGCNNSHNTTYQVPDFSPQSSCISSNSTSDEADDQNLSLINERKHRRMLSNRESARRSRMRKQKHLDELWSQVVWLRNENHQLIDKLNHVSETHDQVLQENSQLKEEASELRQMIRDMQIHSPCGGPNSFITPLEDHDVDHVPSAYLRSDDSSNQFNSCNNNMDLLG

SEQ ID NO: 30628 - protein, 301 aa, Glycine max
  Clone ID: TF_GmC299_2.pep
KLNLACAAVAMTRGSLVKSQNPDSGPQASNFSEVGSHATLKGSGPFGNDDPSKLQNKDIKAQIGIPSSPSMQNKSAVVAMRPTISGSSGEQSDDEEAEGEINMTGNMTPVDAKRVRRMLSNRESARRSRRRKQAHLTELETQVSQLRSENSSLLKRFTDVSQKYSNAAVDNRVLKADVETLRAKVKMAEETVKRITGLSPMLHAMTEMSSLGMPLFDESPSETSADAAVPVQEDPNHHLCQPTSNNGLGGISSIETVQQNVAAVVGGNKMGRTTSLHRVASLEHLQKRIRGGADSRGTPSN

SEQ ID NO: 30629 - protein, 222 aa, Glycine max
  Clone ID: TF_GmC6779_1.pep
FSQDSQLKSGGRQDSFEDEPSQNGSSAYTPQNGGLNIPHTVVNQTMSIIPISAGGAPGAVPGPTTNLNIGMDYWGTPGSSNIPGLGRKVPSTAVAGGMVTVGSRDSAQSQLWLQDERELKRQRRKQSNRESARRSRLRKQAECDELAQRAEALKEENASLRSEVNRIRSDYEQLLSENAALKERLGELPPNDDHHHRSGRNDQHVGNDTQQSGQTEAVQGGH

SEQ ID NO: 30630 - protein, 491 aa, Glycine max
  Clone ID: TF_GmC1611_2.pep
MASQRIGETGLSESGPSSHHVPYGVLHGISTSSGLINQGSAFDFGELEEAIVLQGIKIRNDEAKASALFTGRPSATLEMFPSWPMRFQQTSRGGSKSGGESTDSGSGVNTLSTKNELRFETESPISIKASPSDHHQAFDQHLQQQQQQQQQQQETATAGTSSQNQSAAKSPQEKRKGAGSTSEKPLDAKTLRRLAQNREAARKSRLRKKAYVQQLESSRLKLTHLEQDLQRARSQGVFMGCGGAGGSLTRGAAMFDMEYARWLEEDHRLMGELRNGLQAPLSDSDMRVMVDGYLSHYDEIFRRLGVAAKSDVFHLINGMWTSQAERCFLWIGGFRPSDLIMMLIQQLEPLAEQQIMGMYGLKHSSQQAEEALSQGLEQLQQSLVDTITGGPVVDGVQQMVVAMSKLANLEGFVRQADNLRQQTLHQLCRLLTVRQAARCFIVIGEYYGRLRALSSLWASRPRETLINDDNSCQTTTEMQIVQHSQNYFSSF

SEQ ID NO: 30631 - protein, 377 aa, Glycine max
  unsure (1)..(377): unsure at all Xaa locations
  Clone ID: TF_GmC1716_2.pep
MGNSEEEKSTKTEKPSSPVTMDQANQTNQTNIHVYPDWAAMQHIMGHHAYXGPHSHGQGVPSSPAAGTPSSVESPTKFSGNTNQGLVKKLKGFDELAMSIGNCNAESAERGAENRLSQSVDTEGSSDGSDGNTAGANQTKRKRSREGTPITDAEGKTELQNGPASKETASSKKIVSATPASVAGTLVGPVVSSGMATALELRNPSTVHSKANSTSAAQPCAVVRNETWLQNERELKRERRKQSNRESARRSRLRKQAETEELARKVEMLTAENVSLKSEITRLTEGSEQMRMENSALREKLINTQLGPREEITLSSIDSKRAAPVSTENLLSRVNNSGANDRPAENENDICETKPNSGAKLHQLLDTNPRANAVAAG

SEQ ID NO: 30632 - protein, 153 aa, Glycine max
  Clone ID: TF_GmC306557_1.pep
MSMSMASSSGNSSISTKSQSSGSEGDLQVVITDERKNKRKQSNRESARRSRMRKRNHLDQLTKQLSQLAKNNGEILATIDITTQHYLNVEAENSILRAQMGELSQRLQSLNDIVHDIIINTTTTYERDCYLTSAQNFTTTTYTLCLNQPVFQW

SEQ ID NO: 30633 - protein, 364 aa, Glycine max
  Clone ID: TF_GmC4292_1.pep
MQDPSSNPNSNPNPNPHNANAASQLPRPPQATASTAVAGAFSSSLFARSGGPHHRRAHSEMSFRLPDDMMDLSPSDPFAGGSSTASMEEIGSEDDLFSTYIDVDKLSGANGSGGAGNGADPTGEREKSPARPRHRQSSSVDFGEIMDAKKAMPPDKLAELWTIDPKRAKRILANRQSAARSKERKARYIQELERKVQTLQTEATTLSAQLTLYQRDTSGLSTENTELKLRLQAMEQQAQLRDALNEALKKEVERLKVATGEGMSHTESFNLGMHQMPFSGSNFIPIPPQSGPSGHQNMQMPPFGHSPSTMPTHQLHQTSSHPYSEILQNEQLGRFQGLDISSKGSTLVKSEGPSLSASESSSTF

SEQ ID NO: 30634 - protein, 233 aa, Glycine max
  unsure (1)..(233): unsure at all Xaa locations
  Clone ID: TF_GmC1521_7.pep
MPRRNVSLGNSASHASALPLFLFSGDMESKWGGAPASIMAANFDDFKWIASMFDPGNDDVKPFSDAAFQNQDAVTAFSTCGGVTDDTLVRSQNLTPIQSTISATIDSQSSFCGTVPVSANKPNVRDNQVKGVATTTSGSSREPSDEDDEAGPCEQSTNAIDMKRLRRKVSNRESARRSRRRKTAHLADLEWAVERLRLGNAXLFXQLTDASQQFRDADTNNRVLKSDVEALRA

SEQ ID NO: 30635 - protein, 395 aa, Glycine max
  unsure (1)..(395): unsure at all Xaa locations
  Clone ID: TF_GmC1716_3.pep
MGNSEEEKSTKTEKPSSPVTVDQANQTNQTNIHVYPDWAAMQAYYGPRVTMPPYYNSAVASGHAPHPYMWGPPQPMMPPYGPPYAAIYPHGGVYTHPAVPIGPHTHSQGVPSSPAAGTPLSIETPPKSSGNTDQGLMKKLKEFDHXGLAMSIGNGHAESAERGGENRLSQXDGEGKTEIQGSPISKETAASNKMLGVVPASVAGTIVGHVVSSGMTTALELRNPSSVHSKTSAPQPCPVLPAEAWVQNERELKRERRKQSNRESARRSRLRKQAETEELARKVESLNAENATLKSEINRLTESSEKMRVENATLRGKLKNAQLGQTQEITLKIIDSQRATXXVSTENLLSRVNNSGSNDRTVEDENGFCENKPNSGAKLHQLLDTSPRADAVAAG

SEQ ID NO: 30636 - protein, 224 aa, Glycine max
  Clone ID: TF_GmC1716_5.pep
DTEGSSDGSDGNTSGANQTRRKRSREGTPTTDGEGKTEMQGSPISKETAASNKMLAVVTAGVAGTIVGPVVSSGMTTTLELRNPSSVHSKASAPQPCPVLPAETWLQNERELKRERRKQSNRESARRSRLRKQAETEELARKVESLNAENATLKSEINRLTESSEKMRVENATLRGKLKNAQLRQTQEITLNIIDSQRATPISTENLLSRVNNNSGSNDRTVED

SEQ ID NO: 30637 - protein, 199 aa, Glycine max
  Clone ID: TF_GmC118795_1.pep
ARNPAIRLDEANNSLARNEPLLKRQQTLGEMTLEDFLVKAGVVQESSSLFKSSLLYQNQIGNIASNGPLSASYRFRHVIGTGSSVSCNGLETQNMLAQNNNLVIKDVTTNGAVEKCPSLGESSGKGNRKRIIDGPPEVVVERRQRRMLKNRESAARSRARRQAYTVELEAELNLLKEENEKLKQTLADAERKRKHEISQ

SEQ ID NO: 30638 - protein, 207 aa, Glycine max
  Clone ID: TF_LIB4200-004-Q1-K1-C12.pep
MGTQTMGTHGGGGDSNGKQSPLQPLVRQNSMYSLTLDEVQNQLGDLGKPLTSMNIDELLKNVWTAEASQTIGMDNEGTAQASQASLQRQASLSLTGALSKKTVDEVWRDIQQNKIVGEKKFQDRHPTLGEMTLEDFLVKAGVVADNQMAMPSSLMGTMSDTQTPGRKKSTSEDMIEKTVERRQKRMIKNRESAARSRARKQAYTYEL

SEQ ID NO: 30639 - protein, 139 aa, Glycine max
  Clone ID: TF_GmC4092_7.pep
QNNSGSKEELQALMEQRKRKRMISTRESARRSRMRKQKHLDDLASQVTQLRNENHQILTSVNLTTQKYLAVEAENSVLRAQVNELSHWLESLNEIIHFLNATDGGPPPPPSSFFEPDATFFNKAYLSQPIMASADMLQY

SEQ ID NO: 30640 - protein, 163 aa, Glycine max
  Clone ID: TF_GmC12723_1.pep
NSARASMSNILLQSSSSEEDLQLLMEQRKKKRKQSNRESARRSRMRKQKHLDDLIAQVDHLKKQKSLTLMKVDITTKHYLEVKAENSILWAQKTELTQSLQSLNDIIDLINTTNGVYHTDCYDINNHNNHNNYYNNNNNFMNPMHMAYLNQPIVATADNMFLW

SEQ ID NO: 30641 - protein, 160 aa, Glycine max
  Clone ID: TF_GmC1005_1.pep
MASSKVATTTTTTTNSDISSQQVWDGATMEMESQDNMNMSMSLQDLLTENDAVPPSHSHGRGKRKTLVEEPLVVDKVTLQKQRRMIKNRESAARSRERKQAYTVELESLVTHLEEENAILLKQEADRKRQRFNQLMECLIPVEEKRKPKPMLRRVNSSQW

SEQ ID NO: 30642 - protein, 132 aa, Glycine max
  Clone ID: TF_GmC295_1.pep
VCDLQVVVDERKKKRKQSNRESARRSRMRKRKHLDELTKQVSQLAKGNGEILGTIDITTQHYLNVEAENSILRAQMEELSQRLQSLNDIVDGIINLTNATTAYERDCYLTSAQNITTKNNTLCLNQQAVFQW

SEQ ID NO: 30643 - protein, 152 aa, Glycine max
  Clone ID: TF_GmC295_2.pep
MSMASSSGNSSISTKSQSSGSEGDLQVVVDERKKKRKQSNRESARRSRMRKRKHLDELTKQVSQLAKGNGEILGTIDITTQHYLNVEAENSILRAQMEELSQRLQSLNDIVDGIINLTNATTAYERDCYLTCAQNITTKNNTLCLNQQRFQW

SEQ ID NO: 30644 - protein, 323 aa, Glycine max
  Clone ID: TF_GmC153952_1.pep
MGTQTMGTHGGGGDSNGKQSPLQPLVRQNSMYSLTLDEVQNQLGDLGKPLTSMNIDELLKNVWTAEASQTIGMDNEGTAQASQASLQRQASLSLTGALSKKTVDEVWRDIQQNKIVGEKKFQDRHPTLGEMTLEDFLVKAGVVAGASSNRTNTSTIAGVDSNVAVPQFPSQAQWIQYPQAQYQHPPQSLMGMYMPSQGMVQPLHLGAGASLDVLFADNQMAMPSSLMGTMSDTQTPGRKKSTSEDMIEKTVERRQKRMIKNRESAARSRARKQAYTNELENKVSRLEKENERLRKRKELEQMLSCAPPPEPKYQLRRIASAPF

SEQ ID NO: 30645 - protein, 288 aa, Glycine max
  Clone ID: TF_GmC2191_2.pep
MAMTTTTESDLDYELRYLSLAVTDTFTAVQNLLPDAMTSFSACGLIDPLCSQNLTPKHSTITATIDSQSSICATSNVGSPVSANKPEGRENHTKGATSGSSEPSDEDDEAGACEQSTNPADMKRLRRKVSNRDSARRSRRRKQAQLSDLELQVEKLKVENATLYKQFTDASQHFREADTNNRVLKSDVEALRAKVKLAEDMVTRSSFTTLNNQLLQTQHHQMSTPQQLNTTNLRRMAHVSPTITVHGNDVSYNNGGQNSALGNLDMSFNDINEVMNDAMSCGTIWPLD

SEQ ID NO: 30646 - protein, 175 aa, Glycine max
  Clone ID: TF_GmC1471_1.pep
MVSCIESYIYHINMACSSGTSSGSLSLLQNSGSEEDLQAVMEDQRKRKRMISNRESARRSRMRKQKHLDDLVSQVAQLRKENQQILTSVNITTQQYLSVEAENSVLRAQVGEFSHRLESLNEIVDVLNATTVAGFGAAATSSTFVEPINNNSFFNPLNMGYLNHPIMASADILQY

SEQ ID NO: 30647 - protein, 166 aa, Glycine max
  Clone ID: TF_GmC1471_3.pep
MACSSGTSSGSLSLLQNSGSEEDLQAMMEDQRKRKRMISNRESARRSRMRKQKHLDDLVSQVAQLRKENQQILTSVNITTQQYLSVEAENSVLRAQVGELSHRLESLNEIVDVLNATTTVAGFGAAASSTFVEPMNNNNNSFFNFNPLNMGYLNQPIMASADILQY

SEQ ID NO: 30648 - protein, 195 aa, Glycine max
  Clone ID: TF_GmC726_3.pep
YQYLSETSMEFGNGEFSSEELKKIKENDKLAEIAMADPKRAKRILANRLSAARSKERKMRYISELELKVQTLQTETTTLSTQFTKLQMDNSELKSENNEYKLRIQALEQQSQLKDALNETLDAEVRRLRRTVAELGGESLLSSRMAQQLAISQQVFQLQHQQHPNQLRHVQLDNSHSQEQTQTQSQCHNGKATAY

SEQ ID NO: 30649 - protein, 170 aa, Glycine max
  Clone ID: TF_GmC143038_2.pep
MASWPPKPTEIFCVHAREKAMASSPCDCWPHLSPPSSIEHVWNDIKLDSLSNSPVDIDFNNNHSVSDSSFLNLTSTSSSVFHKHDHDHSLLSVSNTSFEASGSKKTTLLDQRHARIIKNRESAVRSRARKQAYRKGLEVEIARLTEENSRLKRQLKELQCCLSSSDNPPT

SEQ ID NO: 30650 - protein, 150 aa, Glycine max
  Clone ID: TF_GmC463_2.pep
MASSIQQQRSTATSSGSEGGGDPQMIDERKRKRMLSNRESARRSRMRKQKQLEDLTDEVSRLQGANKKLAENIKAKEEACVETETANSILRAQTMELADRLRFFNSILEIAEEVEGLSVEIPEIPDPLLKPWQIPHPIQPIMAPANMFLR

SEQ ID NO: 30651 - protein, 184 aa, Glycine max
  unsure (1)..(184): unsure at all Xaa locations
  Clone ID: TF_jC-gmro02910074b08a1.pep
MLSALTPSDPFSPFSPFSAGFTPWDDNDDSHALFSPKPVSASSSASDYKSEPNPTEHVCASSSVMMDERKRRRMISNRESARRSRMRKQRHLENLRNQLNKCRVENRELGNRLQFFLHHLNRLRTENEWLRSERTLLRQXVAIXTXXLIFQPIQTTFSLLHDHMHQQQHTLMTNPVYIYIYIIY

SEQ ID NO: 30652 - protein, 485 aa, Glycine max
  unsure (1)..(485): unsure at all Xaa locations
  Clone ID: TF_GmC1081_1.pep
MGENEEAMQRLHFLKQPLNMEQLSIPQFNPSQMRARQHHHQNQFDGGNSNKRAGIPPSHPHPIPPISPYSQIPVSRQHNNISPTPTHTRSLSQPSFFSLDSLPPLSPSPFRDSSSTSVSEAADVSMEDRDVSSHSLLPPSPFSRTLNNSNLPLPPRKAHRRSNSDIPFGFSTVLQSSPPLIPLRNPVSAKPAQLVKRETPWDRVVEHNTNTNNNNNVEGSGEKKSPEGEVVDDLFSAYMNLDSFDALNSSGTDDKNGGENRDDLDSRASGTKTNGGDSSDNSARXESGHGGSEKREGMKRSAGGEIAPTTRHYRSVSMDSFIGKLNFDEESPKLPPSPGQRSALMSPAGGIDGNSAAFSLEFGNGEFSGPELKKIMANEKLAEIALIDPKRAKRILANRQSAARSKERKMRYISELEHKVQTLQTEATTLSAQLTLLQRDSAGLTNQNSELKFRLQSMEQQAKLRDALNEALTAEVQRLKIATAD

SEQ ID NO: 30653 - protein, 213 aa, Glycine max
  Clone ID: TF_LIB4280-015-R1-K1-G1.pep
MGSRTTWRVVGVEDDKGAERGMPSFNSELPNSNSCYTEGNTIDSFRVSDFGAFDQSYHIEDAVDLSGNPVYNSLKVNSQTISPGSVHISSLGQLPISLEKSPLTNQTEPPHRLRLQKVQSSNPGTILVGNTDNWEESTMADASPRTDISTDGDTDDKNHPFDRNQALTAVSDSSDRSKDKSDQKTLRRLAQNREAARKSRLRKKAYVPQLESS

SEQ ID NO: 30654 - protein, 204 aa, Glycine max
  unsure (1)..(204): unsure at all Xaa locations
  Clone ID: TF_GmC6275_6.pep
MNSASPQFVSPRSMSVYDPIHQISMWGEGFKSNGNLSAAMPLIDEADMKFDSQSEDASHGILGEPNKYDQEASKPTDKIQRRLAQNREAARKSRLRKKAYVQQLESSRLKLMQLEQELERARQQGMYIGGGLDSNHLGFAGSVNSGITTFEMEYGHXXVNEQNRQITELRNALNAHIXGDVELRILVDGLMSPYAEMFPMKSAA

SEQ ID NO: 30655 - protein, 172 aa, Glycine max
  Clone ID: TF_GmC9762_1.pep
QTSAWLLLVEVEPIHLGKRSLQNSGSEGDRDIMEQRKRKRMLSNRESARRSRMRKQQHLEGLSAQLDQLKKENTQMNTNIGISTQLYLNVEAENAILRAQMEELSKRLNSLNEMISLINSTTTTNNCLMFDEAQETTTQLFNDCGFMDAWNYGIPLNQQIMAYADNDMLMMY

SEQ ID NO: 30656 - protein, 122 aa, Glycine max
  Clone ID: TF_GmC9762_2.pep
MASPGGSGTYSSGSSSLQNSGSEGDRDIMEQRKRKRMLSNRESARRSRMRKQQHLEGLSAQLDQLKKENTQMNTNIGISTQLYLNVEAENAILRAQMGELSKRLNSLNEMISFINSPTTTTA

SEQ ID NO: 30657 - protein, 321 aa, Glycine max
  Clone ID: TF_GmC1737_1.pep
MGSQGGAVQEPKTTTPLARQGSLYNLTLDEVHNQLGNLGKPLGSMNLDELLKSVWSAEAGGGGEASGWDFGVGDATNMPHGKAAASGSSLNPQGSLTLSRDLSRKTVDEVWKDMQLKKVTNRDKKIQERQATLGEMTLEDFLVKAGVVAEALPTKGGAMSGVDSNGAFSQHGHWLQYQPLPAATQLPNVRGGDGAAPAIQQPFQVGVNLVLDAAYSPLVRTIMGTLSDTQTPGRKRGASGVVVEKTVERRQKRMIKNRESAARSRARRQAYTQELEIKVSRLEEENERLRRLNEMERALPSVPPPEPKPKQQLRRTSSAIF

SEQ ID NO: 30658 - protein, 191 aa, Glycine max
  Clone ID: TF_GmC11345_1.pep
SIRQRKVGENNKQLPKRQPHPLKVNLKHSQRQVQNKDQHPQHPPRLFPMRVNVTFVSAPTHLLNNAHVTASPGSKISPDVITRSNNVDNSPISPHYVINRGRKFSAIEKVVERRQRRMIKNRESAASSRARKQAYTFELEAEVAKLKELNRELQRKQEEIMEMQKNKDLDPACRPRVSKIHCLRRTLTGPW

SEQ ID NO: 30659 - protein, 341 aa, Glycine max
  unsure (1)..(341): unsure at all Xaa locations
  Clone ID: TF_GmC858_1.pep
MAQLPPKIXNMTPNWPDFSSPHQKNPFLXTTSSNQNPQWVKEFLESSLGGRGAPRRPVSDSVTFLEAPLLDHLLGKGGGVVGGGGGNKECERVYDVQFLSMFIDEAXGNNNNNNTMMAHTLSSSYPSTPPDHNSINDEKEMENKEEEEKKQVQHETDDEDKSECKHEITQLPNTNDTNNTTTKRVKRILANSNANATCSSEKITDPKRVKRILANRQSAQRSRVRKLQYISELERSVTSLQAEVSVLSPRVAFLDHQRLLLNVDNSALKQRIAALAQDKIFKDAHQEALKREIERLRQVYHQQNIKKMDNAAGSPPSQSPPSPSPKPRCETHTEKEQLINV

SEQ ID NO: 30660 - protein, 274 aa, Glycine max
  unsure (1)..(274): unsure at all Xaa locations
  Clone ID: TF_GmC16145_1.pep
VLSGLNLGVSLEIDDGELFFSKHEVVSSPNMGKHPCSGSMDSFFDELIKDTHACTHTHTCNPPGPDFSHTHTCYHVHTKIVPAPEEDHVATDDTAESAEKKSSSSKKRSLGNKEAVRKYREKKKARAASLEDEVVKLRALNQHLMKKLKGQAALEAEIARLKCLLVDIRGRIEGEIGSFPYXVAGSYVMNPCNLPCDDRVDCLHPDGRIGETAALNGEEFDGCEFENLQCLASQNLGLKDLRACGVGVGHTGSNVNSSALSKKRKGGSRAATAG

SEQ ID NO: 30661 - protein, 272 aa, Glycine max
  Clone ID: TF_GmC16145_2.pep
MDDGELDFSNHEVFSSPNMGELPSSGSMDSFFDELLKDTHACTHTHTCNPPGPDFSHTHTCYHVHTKIVPAPEEDHVATDDTAESAEKKSSSSKKRSLGNKEAVRKYREKKKARAASLEDEVVKLRALNQHLMKKLKGQAALEAEIARLKCLLVDIRGRIEGEIGSFPYQKPTPNANPPVANLPGSYVMNPCNLQCDDRVYCHHPDGRIGETAALNGEEFDGCEFENLQCLASQNLGLKDLRACGVGVGHTGSNVNSSALSKKRKGGTPFMP

SEQ ID NO: 30662 - protein, 110 aa, Glycine max
  Clone ID: TF_LIB4391-035-R1-K1-D6.pep
NNHVLLHLVIVDTDQHTQQRQNQQQHVMVVDGGTSQVAYSSHYPTACMAASATPAVAAPSPSDAPAGLCTSAHQLDYHQAQNVHHQQLKHQQQHVQMFIGQPYCTKLTEQ

SEQ ID NO: 30663 - protein, 299 aa, Glycine max
  Clone ID: TF_GmC6781_2.pep
MKKALPTNGKIAKDAKETVQECLSEFLRSTFQTHVLRWMDYIQHKQEFVGLFEKILLQKPGFEPPVTHPAGVVEADLKSNNTEQSVKNVWVSEVNSSKDKNKAEGKATGGKSTGDKEPTKAKAKPADKEVAEKENEVSVSLLNIQVGLIRKAWKHPSADSLLVEEIDVGEDKVRQVVSGLAKYCNPDELTNRRVVLITNVKPGKLRDVMSQGLVLCASDEGPTIVEPLLPPEGSQIGERISFSGIDGKPEDVLNPKKKQLDKITPHLFTDDKGVATYKGIPFMTSGGPCTSSIPRATIK

SEQ ID NO: 30664 - protein, 89 aa, Glycine max
  Clone ID: TF_LIB3242-495-P1-J1-F3.pep
FISFITSEASDKCEREKRKTINGDDLLWAMATLGFEDYIDPLKIYLTRYREMEGDTKGLAKGGDSSSKKDVQPSPNAQVECTHECANHA

SEQ ID NO: 30665 - protein, 327 aa, Glycine max
  unsure (1)..(327): unsure at all Xaa locations
  Clone ID: TF_GmC17763_1.pep
MGSQDNNVELSSNSFLAYKSAKVFVAGHRGLVGSAIGRKLTQLGFTNLVLRSHAELDLTRQSDVEAFFAYEKPEFVIVAAAKVGGIHANNTYPADFIAINLQIQTNVIDSAYRNGAKKLLFLGSSCIYPKFAPQPXIPEDALLTGPLEPTNEWYAIAKIAGIEMCQAYRIQHKWDAISGMPTNLYGPYDNFHPENSHVLPALMRRFHEAKVNGAKEVVVWGTGSPLREFLHVDDLADAVVFMMEKYSGLEHLNVGSGKEVTIKELAELMKEVVGFEGDLVWDSTKPDGTPRKLMDSSKLASLGWTPKVSLKDGLADTYKWYLENVNL

SEQ ID NO: 30666 - protein, 103 aa, Glycine max
  unsure (1)..(103): unsure at all Xaa locations
  Clone ID: TF_jC-gmro02910071g08a1.pep
SLPGEDCGSWNHTEENKRRTLQKNDIAAAITRTDIFDFLVDIVPREDLKDEVLASIPRGTMPVAGPADALXYCYMPPQHASKVELLVYYGVACDGPNMYAQQS

SEQ ID NO: 30667 - protein, 156 aa, Glycine max
  Clone ID: TF_GmC78471_1.pep
MRKKLDTRFPAARIKKIMQADEDVGKIAMAVPLLVSKALELFLQDLCDQTYEITLRRGAKTMNAFHLKQCVQTFNVFDFLKDIVSKVPDLGSSVATGDDHAVTKRRKVAGDDDNDSDEELKRNKKPEPGHSSGRGRGRGRGRGIRTVDQEIGFTCP

SEQ ID NO: 30668 - protein, 170 aa, Glycine max
  Clone ID: TF_GmC240_1.pep
RVVARTEEEESGVSIQLEFPKGRVKKIMALDKDVKRVSSEALFLVSRSTELFLQFLAEKSAQVAIEKKRKTVNLEHIREAVKRHQPTRDFLLDELPPPSQPTKPDRPTQPAGRPKLDPPPRGTRRIDLFFRKPELDNPAQAQPPENPAQAQPPENPDQDQAQSPVPVDES

SEQ ID NO: 30669 - protein, 215 aa, Glycine max
  unsure (1)..(215): unsure at all Xaa locations
  Clone ID: TF_GmC1633_1.pep
MLATGTPDVTYPSAHQAQDDQQRYPQQQVQMFXSNQMQQNEQTNDHKNHSLPLAQIQKIVQADEDIRMISAEAPVIFAKACEMFILELTLRSWIHTEENKRRTLQKNDIAAAISRNDVFDFLVDIIPRDELKEEGLGITKATIPLVNSPADMPYYYVPPQHPVVGPPGMIMGKPVGAEQATLYSTQQPRPPMAFMPWPHTQPQQQQPPQHQQTDS

SEQ ID NO: 30670 - protein, 156 aa, Glycine max
  Clone ID: TF_GmC1000_1.pep
MEPMDIVGKAKEDASLPKATMTKIIKEMLPPDVRVARDAQDLLIECCVEFINLVSSESNEVCNKEERRTIAPEHVLKALGVLGFGEYIEEVYAAYEQHKLETMQDSLKGAKWSNRAEMTEEEALAEQQRMFAEARARMNGGAIQSKEPEADQSLES

SEQ ID NO: 30671 - protein, 120 aa, Glycine max
  Clone ID: TF_GmC1000_2.pep
MEPMDIVGKAKEDASLPKATMTKIIKEMLPPDVRVARDAQDLLIECCVEFINLVSSESNEVCNKEERRTIAPEHVLKALGVLGFGEYIEEVYAAYEQHKLETMVIMLMTNVHDIYYNLTA

SEQ ID NO: 30672 - protein, 156 aa, Glycine max
  Clone ID: TF_GmC1000_3.pep
MEPMDIVGKAKEDASLPKATMTKIIKEMLPPDVRVARDAQDLLIECCVEFINLVSSESNEVCNKEERRTIAPEHVLKALGVLGFGEYIEEVYAAYEQHKLETMQDSLKGAKWSNRAEMTEEEALAEQQRMFAEARARMNGGAITSKQPDAHQSLES

SEQ ID NO: 30673 - protein, 156 aa, Glycine max; identical to SEQ ID NO: 30670
  Clone ID: TF_GmC1000_4.pep

SEQ ID NO: 30674 - protein, 121 aa, Glycine max
  unsure (1)..(121): unsure at all Xaa locations
  Clone ID: TF_7924671.pep
KPIDIXGKAKEDASLPKATITKIIKEILPPNIHITRDTQDLLIKYYIKFINLISSESNKVYNKEEKRTITPKHIXRTVKILKFSEYIREGDTAYEQHKVKTMQHSXKDAEKNNRPEXTEEE

SEQ ID NO: 30675 - protein, 144 aa, Glycine max
  Clone ID: TF_GmC275948_1.pep
MTGKRNQITTSPVGSPTSGNISDSSSSKEQDRFLPIANVSRIMKRALPANAKISKEAKETVQECVSEFISFITGEASDKCQREKRKTINGDDLLWAMTTLGFENYVGPLKFYLNNYRETEGEKSSMAKQEEHSPTHQTNIDGGG

SEQ ID NO: 30676 - protein, 218 aa, Glycine max
  Clone ID: TF_GmC720_1.pep
MSPRVRPRLREETEGGETVIINSYIISLSHVFFALAPPLPSTTTIFDSAFSDSSFVVTGRIMEPMDIVGKSKEDASLPKATMTKIIKEMLPPDVRVARDAQDLLIECCVEFINLVSSESNEVCNREDKRTIAPEHVLKALQVLGFGEYVEEVYAAYEQHKLETMQDSLRGGGKWSNGAEMTEEEALAEQQRMFAEARARMNGGAIASKQPDADQSLDS

SEQ ID NO: 30677 - protein, 105 aa, Glycine max
  Clone ID: TF_700872266_FLI.pep
FLEFCRASDKCQREKRKTINGDDLLWAMATLGFEDYMDPLKIYLTRYREMEGDTKGSAKGGDSSAKRDVQPSPNAQLAHQGSFSQNVTYPNSQGRHMMVPMQGPE

SEQ ID NO: 30678 - protein, 168 aa, Glycine max
  Clone ID: TF_GmC7912_1.pep
MAGVREQDQYMPIANVIRIMRRILPAHAKISDDAKETIQECVSEYISFITAEANERCQREQRKTVTAEDVLWAMEKLGFDNYAHPLSLYLHRYRESEGEPASVRRASSAMGINNNMVHPPYINSHGFGMFDFDPSSQGFYRDDHNAASGSGGFVAPFDPYANIKRDAL

SEQ ID NO: 30679 - protein, 223 aa, Glycine max
  Clone ID: TF_GmC1642_1.pep
METGGFHGYRKLPNTTSGLKLSVSDMNMNMRQQQVASSDQNCSNHSAAGEENECTVREQDRFMPIANVIRIMRKILPPHAKISDDAKETIQECVSEYISFITGEANERCQREQRKTITAEDVLWAMSKLGFDDYIEPLTMYLHRYRELEGDRTSMRGEPLGKRTVEYATLATAFVPPPFHHHNGYFGAAMPMGTYVRETPPNAASSHHHHGISNAHEPNARSI

SEQ ID NO: 30680 - protein, 226 aa, Glycine max
  Clone ID: TF_GmC1642_3.pep
METGGFHGYRKLPNTTAGLKLSVSDMNMRQQVASSDHSAATGEENECTVREQDRFMPIANVIRIMRKILPPHAKISDDAKETIQECVSEYISFITGEANERCQREQRKTITAEDVLWAMSKLGFDDYIEPLTMYLHRYRELEGDRTSMRGEPLGKRTVEYATLGVATAFVPPPYHHHNGYFGAAMPMGTYVREAPPNTASSHHHHHHHHHHARGISNAHEPNARSI

SEQ ID NO: 30681 - protein, 147 aa, Glycine max
  Clone ID: TF_GmC885568_1.pep
MGDNNIGKVLEREGFKYNFTAAASDTSAQDEVIKEQDRLLPIANVGRIMKQILPPNAKISKEAKETMQECVSEFISFVTGEASDKCHKEKRKTVNGDDICWALATLGFDDYSEPLKRYLHKYREFEGERANQNKGNNNTYENNIANI

SEQ ID NO: 30682 - protein, 271 aa, Glycine max
  Clone ID: TF_GmC1633_3.pep
MDKSEQTQQQQQQQQHVMGVAAGASQMAYSSHYPTASMVASGTPAVTAPSPTQAPAAFSSSAHQLAYQQAQHFHHQQQQHQQQQLQMFWSNQMQEIEQTIDFKNHSLPLARIKKIMKADEDVRMISAEAPVIFAKACEMFILELTLRSWIHTEENKRRTLQKNDIAAAISRNDVFDFLVDIIPRDELKEEGLGITKATIPLVGSPADMPYYYVPPQHPVVGPPGMIMGKPIGAEQATLYSTQQPRPPVAFMPWPHTQPLQQQPPQHQQTDS

SEQ ID NO: 30683 - protein, 185 aa, Glycine max
  Clone ID: TF_GmC1633_5.pep
MGWALPQVLAKWPILLTTRLLPWCSGTPAVAVPSPTQAPAAFSSSAHQLAYQQAQHFHHQQQQHQQQQLQMFWSNQMQEIEQTIDFKNHSLPLARIKKIMKADEDVRMISAEAPVIFAKACEMFILELTLRSWIHTEENKRRTLQKNDIAAAISRNDVFDFLVDIIPRDELKEEGLGITKATIAL

SEQ ID NO: 30684 - protein, 260 aa, Glycine max
  Clone ID: TF_GmC343_1.pep
MDHQGHSQNPSMGVVGSGAQLAYGSNPYQPGQITGPPGSVVTSVGTIQSTGQPAGAQLGQHQLAYQHIHQQQQHQLQQQLQQFWSSQYQEIEKVTDFKNHSLPLARIKKIMKADEDVRMISAEAPVIFARACEMFILELTLRSWNHTEENKRRTLQKNDIAAAITRTDIFDFLVDIVPREDLKDEVLASIPRGTMPVAGPADALPYCYMPPQHPSQVGAAGVIMGKPVMDPNMYAQQSHPYMAPQMWPQPPDQRQSSPEH

SEQ ID NO: 30685 - protein, 242 aa, Glycine max
  Clone ID: TF_GmC343_2.pep
MDHQGHSQNPSMGVVGSGAQLAYGSNPYQPGQITGPPGSVVTSVGTIQSTPAGAQLGQHQLAYQHIHQQQQHQLQQQLQQFWSNQYQEIEKVTDFKNHSLPLARIKKIMKADEDVRMISAEAPVIFARACEMFILELTLRSWNHTEENKRRTLQKNDIAAAITRTDIFDFLVDIVPREDLKDEVLASIPRGTMPVAGPADALPYCYMPPQHASQVGAAGVIMGKPVMDPNMYAQQSHPYMAP

SEQ ID NO: 30686 - protein, 201 aa, Glycine max
  unsure (1)..(201): unsure at all Xaa locations
  Clone ID: TF_LIB4199-001-Q1-K1-E11.pep
MGVATGASQMAYSSHYPTAPMVASGTPAVAVPSPTQAPAAFSSSAHQLAYQQAQHFHHQQQQHQQQQLQMFWSNQMQEIEQTIDFKNHSLPLARIKKIMKADEDVRMISAEAPVIFAKACEMFILELTLRSWIHTEENKRRTLQKNDIAAAISRNDVFDFLVDIIPRDELKEEGLGITKATIPLVNSXADMPYYYVPXQHP

SEQ ID NO: 30687 - protein, 435 aa, Glycine max
  unsure (1)..(435): unsure at all Xaa locations
  Clone ID: TF_GmC89_1.pep
LQKMLSEMQEVTELHPVPDAHVPVVKFKFNGVSVDLLYARLALWVIPEDLDISQESILQSVDEQTVLSLNGCRVTDQVLRLVPNIQTFRTTLRCMRFWAKRRGVYSNVAGFLGGINLALLVARICQLYPNALPDMLVSRFFRVYTQWRWPNPVMLCAIEEGSLGLPVWDPRRNPKDRYHLMPIITPVYPCMNSTYNVTSSTLRVMSDEFRRGSEICEAMEASKADWDTLFEPYXFFESYKNYLQIDITAENADDLRQWKGWVESRLRQLTLKIERHTYGMLQCHPHPGEFSDNSRPFHHCYFMGLQRKQGVPVNEGEQFDIRLTVEEFKHSVNAYTLWKPGMNIHVSHVKRSNIPNYIFPGGVRPTFPSKVTAENKQSSKSRASGHGQTEKPQGGKAVAVGADDVRKRKRSEDNMDNNPRNSSSPVSLAPPSREV

SEQ ID NO: 30688 - protein, 177 aa, Glycine max
  Clone ID: TF_GmC1427_1.pep
MAESDNESGGHTGNASGSNELSGCREQDRFLPIANVSRIMKKALPANAKISKEAKETVQECVSEFISFITGEASDKCQKEKRKTINGDDLLWAMTTLGFEDYVDPLKIYLHKYREMEGEKTAMMGRPHERDEGYGHGHGHATPMMTMMMGHQPQHQHQHQHQGHVYGSGSASSARTR

SEQ ID NO: 30689 - protein, 171 aa, Glycine max
  Clone ID: TF_GmC1427_5.pep
MAESDNESGGHTGNASGSNEFSGCREQDRFLPIANVSRIMKKALPANAKISKEAKETVQECVSEFISFITGEASDKCQKEKRKTINGDDLLWAMTTLGFEEYVEPLKVYLHKYRELEGEKTAMMGRPHERDEGYGHATPMMIMMGHQQQQHQGHVYGSGTTTGSAFFARTR

SEQ ID NO: 30690 - protein, 192 aa, Glycine max
  unsure (1)..(192): unsure at all Xaa locations
  Clone ID: TF_GmC1427_2.pep
MADSDNDSGGAHNGGKGSEMSPREQDRFLPIANVSRIMKKALPANAKISKDAKETVQEVRVKVSSAFITGEXADKCQREKRKTINGDDLLWAMTTLGFEDYVEPLKGYLQRFREMEGEKTVAARDKDAPPLTNATNSAYESANYAAAAAVPGGIMMHQGHVYGSAGFHQVAGGAIKGGPAYPGPGSNAGRPR

SEQ ID NO: 30691 - protein, 229 aa, Glycine max
  Clone ID: TF_GmC18981_1.pep
METNNQQQQQQGAQAQSGPYPVAGAGGSAGAGAGAPPPFQHLLQQQQQQLQMFWSYQRQEIEHVNDFKNHQLPLARIKKIMKADEDVRMISAEAPILFAKACELFILELTIRSWLHAEENKRRTLQKNDIAAAITRTDIFDFLVDIVPRDEIKDDAALVGATASGVPYYYPPIGQPAGMMIGRPAVDPATGVYVQPPSQAWQSVWQSAAEDASYGTGGAGAQRSLDGQS

SEQ ID NO: 30692 - protein, 161 aa, Glycine max
  Clone ID: TF_GmC1163_1.pep
MSEAEELPRSIVRRVVKDKLSRCSEDGEISVSKDALLAFSESGRIFIHYLSATANDICKESKRQIINVEDVFKALEETEFPEFLRPLKASLEEFRKKNAGKKAAVSKGKDDEPRKKRKLEGESPDKGEGSDKAELSDKGEDPDKGESDKGESGDETNDLKE

SEQ ID NO: 30693 - protein, 220 aa, Glycine max
  unsure (1)..(220): unsure at all Xaa locations
  Clone ID: TF_GmC18981_3.pep
RVRGAQAQSGPYPGGAGGSAGAGAGAGAGAAPFQHLLQQQQQQLQMFWSYQRQEIEHVNDFKNHQLPLARIKKIMKADEDVRMISAEGPILFAKACELFILELTIRSWLHADENKRRTPQKNDIXAAITRTDIFDFLVDIVPRDETKDPPALVGATASGVPYYYPPNGQPAGMMIGRPAVDPATGVYVQPPSQAWQSVWQSAAEDTPYGTGAQGNLDGQS

SEQ ID NO: 30694 - protein, 106 aa, Glycine max
  unsure (1)..(106): unsure at all Xaa locations
  Clone ID: TF_LIB4127-338-Q1-J1-B8.pep
AASQSGDSSLLPLLFRVEPMDIVGKAKEDASLPKATMTKIIKEMLPRGGRVDRDAQDLXTSXCVEVINLDWSEGNEVCRKEERRTIAPEHLLKASRALEFGEYIRE

SEQ ID NO: 30695 - protein, 61 aa, Glycine max
  Clone ID: TF_LIB4281-017-R1-K1-D6.pep
MSDAPPSPTHESGGEQSPRGSSSVARQQDRDLPIANIRRIMKKALPPNGGIGEDARDTVQE

SEQ ID NO: 30696 - protein, 58 aa, Glycine max
  unsure (1)..(58): unsure at all Xaa locations
  Clone ID: TF_LIB4127-338-Q1-N1-B8.pep
MRAPAAGRVARDAQDVWSECCPRLVSLVASESNEVCDQEQRRTXIAPVHVLKALWGLG

SEQ ID NO: 30697 - protein, 143 aa, Glycine max
  Clone ID: TF_GmC18981_4.pep
MENNQQQGAQAQSGPYPGGAGGSAGAGAGAGAAPFQHLLQQQQQQLQMFWSYQRQEIEHVNDFKNHQLPLARIKKIMKADEDVRMISAEAPILFAKACELFILELTIRSWLHADENKRRTLQKNDIGGGITRAEILGLVGGVG

SEQ ID NO: 30698 - protein, 113 aa, Glycine max
  Clone ID: TF_GmC718702_1.pep
MRQAGAYSGLLCGGVSGRTGPHSLPLARIKKIMKNSGEDVKMISGEAPIIFSKACELFIEELTRRSWIMAIQGKRRTLHKEDLASAVIATDIFDFLITLVSSSESHAVGGATN

SEQ ID NO: 30699 - protein, 127 aa, Glycine max
  Clone ID: TF_jC-gmXLIB3563P059cd04a1.pep
MDKSEQTQQQHQHGMGVATGASQMAYSSHYPTAPMVASGTPAVAVPSPTQAPAAFSSSAHQLAYQQAQHFHHQQQQHQQQQLQMFWSNQMQEIEQTIDFKNHSLPLARIKKIMKADEDVRMISAEAP

SEQ ID NO: 30700 - protein, 173 aa, Glycine max
  Clone ID: TF_GmC49_1.pep
MSDAPPSPTHESGGEQSPRGSSSGAREQDRYLPIANISRIMKKALPPNGKIAKDAKDTMQECVSEFISFITSEASEKCQKEKRKTINGDDLLWAMATLGFEDYIEPLKVYLARYREAEGDTKGSARSGDGSATPDQVGLAGQNSQLVHQGSLNYIGLQVQPQHLVMPSMQSHE

SEQ ID NO: 30701 - protein, 174 aa, Glycine max
  Clone ID: TF_GmC49_2.pep
MSDAPASPSHESGGEQSPRGSLSGAAREQDRYLPIANISRIMKKALPPNGKIAKDAKDTMQECVSEFISFITSEASEKCQKEKRKTINGDDLLWAMATLGFEDYIEPLKVYLARYREAEGDTKGSARSGDGSARPDQVGLAGQNAQLVHQGPLMHIVLQVQPQHLVMPSMQGHE

SEQ ID NO: 30702 - protein, 76 aa, Glycine max
  Clone ID: TF_LIB3167-011-P1-K1-B5.pep
MSYAPPSPPHENLGHHSPHGSSSSSSYHDQNLTISNICRIMKNAMSPNLKIANDSKDTVHEFCTHFIYFITNEAIY

SEQ ID NO: 30703 - protein, 171 aa, Glycine max
  Clone ID: TF_GmC6781_1.pep
MADGPASPGGGSHESGDHSPRSNVREQDRYLPIANISRIMKKALPANGKIAKDAKETVQECVSEFISFITSEASDKCQREKRKTINGDDLLWAMATLGFEDYMDPLKIYLTRYREMEGDTKGSAKGGDSSAKRDVQPSPNAQLAHQGSFSQNVTYPNSQGRHMMVPMQGPE

SEQ ID NO: 30704 - protein, 274 aa, Glycine max
  Clone ID: TF_GmC140739_1.pep
ETVKTESDASSTISSESGSIGCVNNANLAKRKTTQNNSSGSSQWTLLDLYSGCGAMSTGLCLGASLAGIKLVTMWAVDINAHACKSLKLNHPETHVRNEPAEDFLNLIKAWAKLCEEFALLGSERSDSDPDMDEDENEAVRKEESGNQSDSEEFEVEKLLAVCYGDPNDVKKPGLYFKVRWLGYASSYDTWEPIEGLSDCKEAMKDFVTKGYKKRLLPLPGDANFICGGPPCQGVSGFNRFRNAAAPLEDTKNKQLLVYMDIIDFLKPKYVLME

SEQ ID NO: 30705 - protein, 203 aa, Glycine max
  unsure (1)..(203): unsure at all Xaa locations
  Clone ID: TF_LIB4281-035-R1-K1-H4.pep
TQRPDLFAKKIRDNSAKVERIERSDAKENLCQACGENENLVSCGTCTYAYHPRCLLPPLKGPLPDNWRCPECVSPLNDIDKILDCEMRPTTAADNEATKLGSKQIFVKQYLGKWKGLSYLHCTWVPEKEFLKAFKTHPXLKTKVNNFHQKMASVNTSDEDFVAIRPEWTTXDRILACRGDDDEREYLVKWKELPYDECYWEFE

SEQ ID NO: 30706 - protein, 97 aa, Glycine max
  unsure (1)..(97): unsure at all Xaa locations
  Clone ID: TF_8827924.pep
EGSKMHLVFHISLLKKAVKPTCSRQLLPTAVNENWELQVQPEKVMQSITXEDGRKEVLIKWRGLPHHEDSWELADEMQAVFPQLDLENKVHLEGRGY

SEQ ID NO: 30707 - protein, 177 aa, Glycine max
  unsure (1)..(177): unsure at all Xaa locations
  Clone ID: TF_15286908.pep
IPSRLEEVNKLIIARDGLLATLRENLXSLKISCEQXTNKRRRDIEYVVGDXVFLKMQPYRRRSLAKRINEKLSPRFYAPFQVFNKVGTIAYKLDLPSHIKIHPVFHVSLLKKASPNXLPPMLSEDWKLQTYSDSVLDSRELQPGNVKVLIQWKNLPPSENSWESVAKLQEIFSIYHL

SEQ ID NO: 30708 - protein, 144 aa, Glycine max
  Clone ID: TF_13789341.pep
EFGTRLKLRPHRQSSAKGPEPITGKLSKRFFGPFQVVERVGKGAYRLQLPVDAKLHPVFHCSLLKPFQGNPPDTAAPLPPTLFDHQSVIAPLVILATRTVNDDDIEVLVQWQGLSPDDATWEKWTELCKEFHLEDKVLPHGPVE

SEQ ID NO: 30709 - protein, 249 aa, Glycine max
  Clone ID: TF_LIB4167-004-Q1-K1-G11.pep
GPELPLRPTRPGGAAVAQGGRQGFPVLGENFFEVQAIRRKRVRKGQVQYLIKWNGWPETANTWEPPENLESVPDVVEAFEESLKSGKHRKRKRKHVVHHTQPKKRLERSTTPYSLRRFSTGTAENHTQSAPPLIDPSLPNIPAFPRTVLFSDDVGNGAEGSSLRKATPSNANRSANGSEPNIKRTEENDYDPVLSELKTMTANGNDTDRLAIRIPEAKGSGPSGSNDQMDAKSKGVSMENKCSGRCRSK

SEQ ID NO: 30710 - protein, 464 aa, Glycine max
  Clone ID: TF_GmC149_1.pep
MKGGGGKRKASTSEAPNDVVVVVAAASAPSDDADLGVGDVGGVKVQNFEGNEGTQLRNTEEQEEEPHHVEGDEGGEDEEDYAEGEEEYEEENGGAVAGGQQGFPALGENFFEVEAIRRKRLRKGEVQYLIKWNGWPETANTWEPLENLESVPDVVEAFEESLKSGKHRKRKRKHVVHHTQPKKRLERSTTPYSLRRFSTSTAENHTQSAPPLNDPSLPDIPAFPHTVLFSDDVGNGAEGSSLRKATPSNANRSANGSEQNIKRNEENDYDPVLSELKAMTSNGNDADRLAIRIPEAKGSGPSGSNGQMDAKSKGACMETSESDRCRGSKRRKCGSVKRFKKELYANEPANAENPVSMPVGTAEPERTRDAGSGGNTNHARPASNIVNIVKPVGYSASVASGMQDVLVTFVASKSDGTEVMVDNKYLKAFNPLLVVPYTFTLLHLIIGCIIFLVPHLLRISVFSP

SEQ ID NO: 30711 - protein, 296 aa, Glycine max
  Clone ID: TF_GmC69_1.pep
MKKRSSSSSSSSVFEANGVEEPQQPSSCAAAALDELHKEKNENGEETLVPSNPYPNLDDGFYEIETIRRKRLRKGQLQYLIKWRGWPETANTWEPLENLQSVPDLVDAFEDSLKSGKHQKRKRKHVDVLQLTLLKKRSERSTTSYSLRHFPPLTPTNANDYDPKLSELKAPTHTGVQLDNLAIHFQQPIPSRGAKRRKSASSVKRFKRDTDAAALQPISAPINMPDANTACNIVKIIKPIGYSASLSDNMHDVLVTFMAMRSDGTEVMVDNRYLKAYNPLLLINFYEMHLRYTPTP

SEQ ID NO: 30712 - protein, 83 aa, Glycine max
  Clone ID: TF_uC-gmroLIB3259P228e07b1.pep
DIFKHNSQVERVIADRISKDNSGNVIPEYLVKWQGLSYAEATWEKDIDIAFAQHTIDEYKAREAAMAVQGKMVDSQRKKSKGW

SEQ ID NO: 30713 - protein, 180 aa, Glycine max
  Clone ID: TF_GmC986_10.pep
MSGRVSGKVKWFNDQKGFGFITPDDGSEELFVHQSQIKSDGFRSLAEGESVEFAIESESDGRAKAVDVTGPDGASVQGTRRGGDGGRSYGGGRGGGYGGGGRGGGGGACYNCGESGHLARDCSQGGGGDRYGGGGGGGGRYGGGGGGRYGGGGGGGGGGGSCYSCGESGHFARDCPSSAR

SEQ ID NO: 30714 - protein, 201 aa, Glycine max
  Clone ID: TF_GmC986_23.pep
MSGRVSGKVKWFNDQKGFGFITPDDGSEELFVHQSQIKSDGFRSLAEGESVEFAIESESDGRAKAVDVTGPDGASVQGTRRGGDGGRSYGGGRGGGGGGYGGGGGYGGGGGYGGGGGYGGGGRGGGGGACYNCGESGHLARDCSQGGGGDRYGGGGGGGGRYGGGGGGRYGGGGGGGGGGGSCYSCGESGHFARDCPSSAR

SEQ ID NO: 30715 - protein, 82 aa, Glycine max
  Clone ID: TF_uC-gmropic007f04b1.pep
MRMMSGRVSGKVTWFNDQKGFGFITHDNGTEELFTHQSDIKSDGFRRLAEGASVKFTIAFKSAWTLHDVDVTGPDGSRVQWT

SEQ ID NO: 30716 - protein, 148 aa, Glycine max
  Clone ID: TF_GmC986_16.pep
MSGRVSGKVKWFNDQKGFGFISPDDGSDDLFVHQSQIKSDGFRSLAEGESVEFAIESESDGRAKAVDVTGPDGASVQGTRRGGDGGRSYGGGRGGGGGGYGGGGGYGGGGGYGGGGGYGGGGRGGGGGSCYSCGESGHFARDCPSSAR

SEQ ID NO: 30717 - protein, 188 aa, Glycine max
  Clone ID: TF_GmC986_24.pep
MSGRVSGKVKWFNDQKGFGFISPDDGSDDLFVHQSQIKSDGFRSLAEGESVEFAIESESDGRAKAVDVTGPDGASVQGTRRGGDGGRSYGGGRGGGGGGYGGGGGYGGGGGYGGGGGYGGGGRGGGGGACYNCGESGHLARDCSGGGDMEAGGGGRYGGGGGGGGGGGSCYSCGESGHFARDCPSSAR

SEQ ID NO: 30718 - protein, 200 aa, Glycine max
  Clone ID: TF_GmC986_15.pep
MSGRVSGKVKWFNDQKGFGFISPDDGSDDLFVHQSQIKSDGFRSLAEGESVEFAIESESDGRAKAVDVTGPDGASVQGTRRGGDGGRSYGGGRGGGGGGYGGGGGYGGGGGYGGGGGYGGGGRGGGGGACYNCGESGHLARDCSGGGGGDRYGGGGGGRYGGGGGGRYGGGGGGGGGGGGSCYSCGESGHFARDCPSSAR

SEQ ID NO: 30719 - protein, 173 aa, Glycine max
  Clone ID: TF_GmC24172_2.pep
MAEERFTGVVQWFNNGKGFGFIKPDDGGEDLFVHQSSIRSDGYRTLLEGDRVEFAIATGDNDKTKAVDVTGVDGAPLQPRASAANNRAGGSGFGARRNGGSGAACYQCGDFGHLARDCNRSSNTGGGGGGSGGGCFNCGGFGHLARDCVRGGGGNVGVGGGCGSGSCFRCGGF

SEQ ID NO: 30720 - protein, 98 aa, Glycine max
  Clone ID: TF_GmC1564_1.pep
MSTTESQRYKGTVKWFNEEKGFGFITPEDGGSDLFVHYSAIQTDGGFRTLSEGQSVEFLVTQDDSGRAAAVNVTTTTVKSSDSGNGENSGGDAANVEK

SEQ ID NO: 30721 - protein, 196 aa, Glycine max
  unsure (1)..(196): unsure at all Xaa locations
  Clone ID: TF_GmC1314_1.pep
MSESEKQRVTGKVKWFDDQKGFGFITTDDSGEEFFVHQSSIRSDGFRSLALGESVEFLIDSDPEGRTKAVDVTGPDESPVQGTRGGGGGGRGSYGGGGGRGGYGGGGRGGRGGYGGGGGGYGGGGYGGGGGYGGGGGGGGGGGCYKCGETGHIARDCSXQGGGGGGRYGGGGGGGGSCYNCGESGHFARDCPSSAR

SEQ ID NO: 30722 - protein, 164 aa, Glycine max
  Clone ID: TF_jC-gmXLIB3563P068bb10a1.pep
AESGPQRALSSPTAAAGLVTITPREEPQLPQPAPVTITATMSSEAETQQPPAAPPVAPALSAADTKPGTTGSGAGSGGPGGLTSAAPAGGDKKVIATKVLGTVKWFNVRNGYGFINRNDTKEDVFVHQTAIKKNNPRKYLRSVGDGETVEFDVVEGEKGAEAAN

SEQ ID NO: 30723 - protein, 107 aa, Glycine max
  unsure (1)..(107): unsure at all Xaa locations
  Clone ID: TF_jC-gmst02400008a08a1.pep
GSRNWYNDQNGFGFITHDDGMEELFVHQSQIKSDGFRILAEREYVQFSIESESDXRATAVDVTGPDRARVQGTRHCGDGRRSYGGGRGGAVSGYRCCIVYCDCVGSG

SEQ ID NO: 30724 - protein, 176 aa, Glycine max
  Clone ID: TF_GmC954_1.pep
MAETRRSTGTVKWFNAHKGFGFITPQDGTDDLFVHFTSIRSDGYRSLSDGQSVEFLLDYGDDGRTMAVDVTSAVRSRLPGGFRGGGGGRGRGGGRYGGGEGRGRGFGRRGGGPECYNCGRIGHLARDCYHGQGGGGGDDGRNRRRGGGGGGGGGCFNCGEEGHFARECPNVGKGNE

SEQ ID NO: 30725 - protein, 72 aa, Glycine max
  unsure (1)..(72): unsure at all Xaa locations
  Clone ID: TF_6134224.pep
MAESRRSTGTVKWFNSQKGFXFITAQDGTDNLFVHFTSIRSNSYRSLSKGQSIKFLLNYSNNSHTITINITS

SEQ ID NO: 30726 - protein, 58 aa, Glycine max
  unsure (1)..(58): unsure at all Xaa locations
  Clone ID: TF_LIB3051-101-Q1-K1-H12.pep
FNNGTGFSFIKPDNGNXNLFHHQYSIRSDGYRTLLEGYRFEFAIVTDNNDKNNAVYFT

SEQ ID NO: 30727 - protein, 159 aa, Glycine max
  Clone ID: TF_15285323.pep
GTLRNVPVGGGCRRNKRSRGSSSSNTRSPANSDRQTASAGSASTTSGSSSADLVASLGGGTGVPPSLRFMAPLHQLGDHHHLGGGGGEIGLSYGLNYGAISGPMGGIGDLNFHIGGTLSGGGSMLSGLDQWRVPQTHQFPFLSGLEATSSHGLYPFEGA

SEQ ID NO: 30728 - protein, 206 aa, Glycine max
  unsure (1)..(206): unsure at all Xaa locations
  Clone ID: TF_GmC735_1.pep
TVHVALPTVPVGAGSRRNNXSKRSSRSKSPASSEKQQTLSGSTSAIVPSGGTTHEQIGHQLPQPQNLPFLASLQNLNRYAVGNMGLGLREIHGQNENMGFQIGNSSAGGGMDQWRLHQQVPFFNGFESTSAGXYPFQNEGINETPSGFGGDITTNSRVSQMPSVKMEESGALNLSRSTLNNVSENNQYYSWTDMSGLASFSATHLL

SEQ ID NO: 30729 - protein, 348 aa, Glycine max
  Clone ID: TF_GmC61107_1.pep
PRAEFGTRAQRKPSSINGGGGGGGVLLPITTPSPSSFPSSTTSDVTLTSTTTTAATTAATAATTTTAVENLRCPRCDSSNTKFCYYNNYNLTQPRHFCKTCRRYWTKGGALRNVPIGGGCRKNKSIGVASSVAGKTASTKMKTIASEFGKSPGFGGGFEVEHELPPPPGQILWGSPQNTHLLALLRATQTQNPNPNPSPMSLKEEGTLLGHMVSTDQPLVSNTLLSYRTLGYDAVAQVPSSLGLFGRNNQDQQQQNGGFLVGEHHNNSGIQELYQKLRSSSTVNNNYCSDNNSSQMFMGNMASNYSSSVSNNILETTSVAGGEFGYWNGPTFSNWSDLPTTNGAGAYP

SEQ ID NO: 30730 - protein, 148 aa, Glycine max
  Clone ID: TF_GmC161628_1.pep
YWTAGGTMRNVPIGAGRRKNKHLASQYRHIIVTSDGIPTSRLETTDSSGLQQQHIASLESSVPFRSSADNGTVLKFGPDIPLCESMDSMLNLRDQRRCVDASSISCVEYRGEPSLYGSSVTTNGAQGSELSEHSPSNWLQCYPVPPWV

SEQ ID NO: 30731 - protein, 179 aa, Glycine max
  Clone ID: TF_GmC68522_1.pep
MSEAKDPAIKLFGKTIPVPEILPGSNGAPASSSGDVVVDDSVDASSTNSSRESHTNTDAQEKDFDKDTLGEKPTDDKKEDGAPAQSSEEVTNLDTASGTCEESITLSTEREATTLKTTKTEEEQGETSYSQDKNLKKPDKILPWPRCNSMDTKFWYYNNYNVNQPRHFCKNCQRYWTAG

SEQ ID NO: 30732 - protein, 385 aa, Glycine max
  Clone ID: TF_GmC1363_1.pep
MLESKDSTMKLFGKTIPAPEISAGAPALSSGDADAVGVVQNHGSSSVNGDGEEHEIEQDIMGEETTESEKEDEVTNLDTVSRPGEVSINPSTKKEDLTLKTSKKTEQEQGENSQDKTLRKPDKILPCPRCNSMDTKFCYYNNYNVNQPRHFCKNCQRYWTAGGVMRNVPVGAGRRKNKNFTSQYRQITVPEAALLSSQPDLPNGVSHPSLNCNATLLAFGSDTPLCESMTSVLNLAEKAVNNSTTNGFNGSEELEIPFAYVAGEKVNDDSNKSSDMSTKPMEGETTNRSQEQVIENCHPFPPHAPYFPGAPWPFPWNPALWNSPVPSPPAFFPQGFTMPLYPAAAYWGLTIPGAWSIPWLAQPSLPNSTVSNSGPDPIARTIAMS

SEQ ID NO: 30733 - protein, 326 aa, Glycine max
  Clone ID: TF_GmC584_2.pep
MGSNGGSSNNNKVMEKPGQNQLVQQQQHPETLKCPRCDSSNTKFCYYNNYSLSQPRHFCKACKRYWTRGGTLRNVPVGGGCRRNKRVKRPITSPCSAAIDTASNSSNSSSAPTAAASLQPQIDTASTSNHINPLFYGLPSSSSDVNLPLFSRFGSRISSSGFDLQLNNALGLGFSSGVLSNEASDNNGYRSGFGSNNMLLSSYTSTTTTTPAMSSLLLQQKFISGGLKNDADSSNTFQHGLSLTSLEQLQIASDHSSEAGMVALKDVKVELGQNNNRLEWNGGAFQSQIQHVGLYDPLLYWNNSATALGVWNDQAANIGSSVTSLI

SEQ ID NO: 30734 - protein, 139 aa, Glycine max
  Clone ID: TF_LIB3242-349-Q1-J1-C1.pep
MHGYYRSLGKHGVRFFSLVFSLMHKFRAVHSELVRSMEDIGPNSCTRPVTEKKARPLEQLNCPRCSSTNTKFCYYNNYSLTQPRYFCKTCRRYWTEGGSLRNVPVGGGSRKNKRVTSSKVPDLNPPISLSSVSAISSQN

SEQ ID NO: 30735 - protein, 89 aa, Glycine max
  Clone ID: TF_GmC108_1.pep
MGLSSKQVSSSGLDWKQTLLEAQNLELPKPNLMRKQQQQQQQQQQQTQPNSESLKCPRCDSTNTKFCYYNNYNKSQPRHFCRACKTHWY

SEQ ID NO: 30736 - protein, 311 aa, Glycine max
  unsure (1)..(311): unsure at all Xaa locations
  Clone ID: TF_GmC66473_1.pep
KSFLYLHPSIGTAQWPQDLLVKAIEAIVVPKTCPKDQQSKSRPQKELDFIFPWCHSINTKFSYYNNYSGTQPNCLCNACRXYWTEGXTTFNIPVGGASKKKSYSSSKVSSHYHNHLKHHSLHSHILSEFVQELYKVWHTQNPNSNNAIHQCQDLNLAFPSSTPDFRKISELVQQNNNNNNSSNNSMSASASSSSTTTTTSTSHLSALELLTGITSSSSAGLTSFMPVPVPSDPNSIYTCGFPLQDFKPTLNFSLDGIGNGYTSLQNVQSGRLLFPSDDLRQVSSSTITTMDQKQQGDSTGYWTGMLGGGSW

SEQ ID NO: 30737 - protein, 122 aa, Glycine max
  Clone ID: TF_LIB3167-024-P1-K1-C9.pep
MEGMAPNSCARPVVEKKARPQEQLNCPRCNSTNTKFCYYNNYSLTQPRYFCKTCRRYWTEGGSLRNVPVGGGSRKNKKVSVTASSSPKVPDLNPPNHSAISSHNPKIMHGGQDLNLAFQPWK

SEQ ID NO: 30738 - protein, 289 aa, Glycine max
  Clone ID: TF_GmC55946_1.pep
MFPQSFNISGGGAGLEQLLQPHHFPSPMEQQQQRSRWKPSVEVAPNCPRCASTNTKFCYYNNYSLSQPRYFCKGCRRYWTKGGSLRNVPVGGGCRKNRRGKSLQSSSSRQQRASSFVSGDTESSFSDAQQINNGSRDIDMALVFAKFLNPKPTTGEDNNGSSSTSNNFTPESVEIENDAVVQSQNKASSDPVIVESENLSLGEIDELERLLGVCGDEDGLWSDATLSSSVTWEPPLKELEYSMPLNEDDDDAQLLPIITSASTMISDSCWSNWSSFDLSTMEAFSSSPS

SEQ ID NO: 30739 - protein, 285 aa, Glycine max
  Clone ID: TF_GmC6535_1.pep
MNPSSGQPQQMSSQSVEKKPKPHPEQALKCPRCDSTNTKFCYYNNYSLSQPRYFCKSCRRYWTKGGTLRNVPVGGGCRKKRSSSLKRAQDQTLTPNLNPLTTLPHLSYDSNDFTLAVARFQKQSSGQLGYNDRDLSTLGNPTTGSFCDILGNSGMNPSSANPSFLDAIRTGFLETQNHLQNLYCMYGNGDLGEVDNGNSGVVGVSGEMMLPYDQVIMSNATTQSVSVMKQEMCSRREQSERRVLGGFPWQINADTNIGELDSGRTIASWNSFTNSWHGLLQSPLM

SEQ ID NO: 30740 - protein, 349 aa, Glycine max
  Clone ID: TF_GmC476_1.pep
AYTCKKNSQQPNQQAGIGTNNPQIPPPLQPSPPSSVTTGIGGSDYIQGSIRPGSMADRARMAKIHQPDAALKCPRCESTNTKFCYYNNYSLSQPRHFCKTCRRYWTRGGALRSVPVGGGCRRNKRNKGNSARSKSPMKPSASANSSSSGCTPDHVMMTHLPTPITPTQFPFLASLHHYNGDYVSGGIGSHFGAITTPLFQIGTSSASSLGNISGGAMLSNNGLGDQQWRFNNLQQVQHQFPFLSTNFEPQIGVFQFGGGENNNAEPPSYAKGHGGRFNNIRSKMDSINSSVSGIVPQLNTIKLEENQGLSLSKNLLMTSSGNGVLWNNGSSGNAWSEVPSFIPSPNHLL

SEQ ID NO: 30741 - protein, 211 aa, Glycine max
  Clone ID: TF_GmC551_1.pep
MQDPTLFQPMKPHFPEQEQLKCPRCDSTNTKFCYYNNYNLSQPRHFCKNCRRYWTKGGALRNIPVGGGSRKNTKRSSSSNNNTKRASPSPPVSSAPAPEPDPTRIGPTPVVGGGSFSSLLASSGHLGLGNLLEGLNSSGSNLKTVQMEEFGENVSSGPVADPDSGRNPGLEMQSNGNAESFLSLQNGDSGCCNGTNGWSNLAIFTPGSSYQ

SEQ ID NO: 30742 - protein, 211 aa, Glycine max
  Clone ID: TF_GmC551_2.pep
MQDPTLFQPMKPHFPEQEQLKCPRCDSTNTKFCYYNNYNLSQPRHFCKNCRRYWTKGGALRNIPVGGGSRKNTKRSSSSNNNTKRASPSPPVSSAPAPEPDPTRIGPTPVVGGGSFSSLLASSGHLGLGNLLKGLNSSGSNLKTVQMEEFGENVSSGPVADPDSGRNPGLEMQSNGNAENFLSLQNGDSSCWNGTSGWSHLAIFTPGSSFQ

SEQ ID NO: 30743 - protein, 252 aa, Glycine max
  Clone ID: TF_GmC1650_2.pep
MEDIGPNSCTRQVAEKKARPQEQLNCPRCSSTNTKFCYYNNYSLTQPRYICKTCRRYWTEGGSLRNVPVGGGSRKNKRVTSSKVPPDLNPPSLSSVSAISSQNPKMQGVHDLNLAFPTAIDNYHGMSPYVEMPKLEIGGDHSTSHSHHHSPSAVELLRSGMASRGLNPYAPNSMMSTSDHSLYTTGYPMQEIKPNLSFSVDDGFGNRSYGVQENGGGRLLFPFGDIKHLSAGVEVEHNKERGNNSTGYWTGW

SEQ ID NO: 30744 - protein, 153 aa, Glycine max
  Clone ID: TF_GmC1387_1.pep
MGEESQGIKLFGALITLKGGEVKKGEKGSEYERVEKRAEKIIPCPRCKSMETKFCYFNNYNVNQPRHFCKSCQRYWTAGGALRNVAVGAGRRKAKSPCHGAGDFMDGRAYETSEDENRFEMNQGHVAMPNTHFRQIFQAKRQRITSGAQHQGQ

SEQ ID NO: 30745 - protein, 147 aa, Glycine max
  Clone ID: TF_LIB5119-021-A1-PF1-F7.pep
MAEESQGIKLFGAMITLNRGEVNKGEKGSEYERVEKRAEKIIPCPRCKSMETKFCYFNNYNVNQPRHFCKSCQRYWTAGGALRNVAVGAGRRKVKSPCHGAGVYESTSEDENKFEMGQGHVAMPNTGFRQIFQAKRQRITSAQHQGQ

SEQ ID NO: 30746 - protein, 156 aa, Glycine max
  Clone ID: TF_GmC52517_1.pep
MPSSNSGESRRASKPQSSGGAAPPPPEQENPPCPRCDSTNTKFCYYNNYNYSQPRHFCKSCRRYWTHGGTLRDIPVGGGSRKNAKRSRTHHVAATSSSSTSCTMTSAQEHHAHTLLAPVASTHYGVLDGDVKQTSNGNGNVCGSFTSLLNNTHGSG

SEQ ID NO: 30747 - protein, 285 aa, Glycine max
  Clone ID: TF_GmC108_2.pep
MGLSSKQVSNRGLDWNQTLLQAQNLELPNPPPMRKQQQTQPSEPLKCPRCDSINTKFCYYNNYNKSQPRHYCRACKRHWTKGGTLRNVPVGGGRKNKRVKKSTTPAIATTSISTSTSNANMDGELNNPITIPSLAVDDHKTTPSSLYQYVCLPQQMMMSTKDSEEGKDFGIGNGIFLSSTVPFPQSQSLLFPFTTSNSFDPNLCAISSSFRSSSVYNYGEEFKIMEEPTLNSIMPNTSGSTNTQPWEIAATSSGMEMSNYWTWEDIDSFVSTDPNVPWDDSDIKP

SEQ ID NO: 30748 - protein, 147 aa, Glycine max
  Clone ID: TF_LIB3242-248-Q1-J1-F9.pep
NKFSKSQKRTIYSYSLYAILLNIPELFSLLLLNNFFLSFFLLVLQQQNQHQANGSNSPHELLPPLPQPPQAPHVGVESEQIRSGLMADRAKIPAPEGVLKCPRCESTNTKFCYFNNYSLSQPRHFCKTCRRYWTRGGALRNVPVGGG

SEQ ID NO: 30749 - protein, 118 aa, Glycine max
  Clone ID: TF_GmC52517_2.pep
MPSSNSGESRRASKPQSSGGAAPPPPEQENLPCPRCDSTNTKFCYYNNYNYSQPRHFCKSCRRYWTHGGTLRDIPVGGGSRKNAKRSRTHHVADTSSSSTSSTMTSAQEHHAHTLLAP

SEQ ID NO: 30750 - protein, 83 aa, Glycine max
  unsure (1)..(83): unsure at all Xaa locations
  Clone ID: TF_GmC154178_1.pep
MSPDDTPPPKPATAKDQETQSSGGGRKSSSTRPQEQGLKCPRCDSPNTKFCYYNNYSLTQPRHFCKTCRRYWTKGGAXRNVPI

SEQ ID NO: 30751 - protein, 471 aa, Glycine max
  Clone ID: TF_GmC196_1.pep
MHEIRDPAIRLFGQKIPFPEDVDKEEESAEDREQEMEEHEDEGDKDTRVENVTKEELEADPPLDAEETKISGTSPEAIVNPKTPSIEEETAKSKGGKSEKEQGDAANSQEKTLKKPDKVLPCPRCKSMDTKFCYYNNYNVNQPRYFCKDGCEKTTEGGTMRNVPVGAGRRKNKNSTSHYRHITISEALQAARIDAQNGTHLPTLKGNGRVLSFGLDAHAPICDSMASLMNLGEKKALNGTRNGFHHGFEDQRLPVPCKSGENGDDSSTTSSITISSPKGENNKSTFQQQPLPQNHGFLPQVPCIPGVPWPYTWNSPVPPPALCPSGFPLPFYPATFWNCGMPGNWNVPWFSSSSPASNLKSPSSSPNSPTLGKHSRDSDMIKQDSLHKEEASTPRNGSVLVPKTLRIDDPSEAAKSSIWATLGIKNESVSGGAMFKAFQSKKGEKNHVEASPMLMANPAALSRSLNFHENS

SEQ ID NO: 30752 - protein, 111 aa, Glycine max
  Clone ID: TF_GmC128906_1.pep
MEQGVEEGGGMNKIPRDSRVKEIRQGDAQIQVQAPQQPQKCPRCDSLNTKFCYYNNYSLSQPRYFCKTCRRYWTQGGTLRNVPVGGGCRKGKRAKSSNSSSSENMNSSSRS

SEQ ID NO: 30753 - protein, 204 aa, Glycine max
  Clone ID: TF_GmC261506_1.pep
MQENKDPAIKLFGQKIAFAGEVDPPAISAGEIDSPPAMDVDKDEEDDFGDSETEDEKDKDPRAEKVSEKTKEADPPPNAADSKKTPEGIQNPNTPSIDEESAKSKTNKSENNNNNKTLKKPDKILPCPRCNSMDTKFCYYNNYNVNQPRYFCKACQRYWTAGGTMRNVPVGAGRRKNKNSASHYRHITISEALQAARIDAPNGT

SEQ ID NO: 30754 - protein, 314 aa, Glycine max
  Clone ID: TF_GmC433_2.pep
MMGRVMEKPSQDLLQQQQQALKCPRCESSNTKFCYYNNYSLSQPRHFCKACKRYWTRGGTLRNVPVGGGCRKNKRVKRPTNHGDSSSSAANSPSSSNSNPPSQPHLDNIIASSSTTNHINNISPFFYGGDVMSSVPFPRFNLHSQLNALGLGFSTGVSENGFSTSNNNSFFSAYNSMFGSSSSSTCAPSTPVMASLLSSTLLQQNLMGGGGGGVKGRDHDQGDNTFHGLAPLQGLRVEGDSNNNIGSKEVKGEGQNRFEWSNNNNNNNNNGGGGQNQMEHVGLSDPNSLYWNTATGLGAWSDQPNIGPSVTSLI

SEQ ID NO: 30755 - protein, 257 aa, Glycine max
  Clone ID: TF_GmC1650_1.pep
MEDIGPNSCTRPVTEKKARPQEQLNCPRCSSTNTKFCYYNNYSLTQPRYFCKTCRRYWTEGGSLRNVPVGGGSRKNKRVTSSKVPDLNPPISLSSVSAISSQNPKMQGVHDLNLAFPAAMDKYHHGTSPYVEMPKLEIGGDHSTSHHSHHHSHSPSSAVELLRSGMDSRGLNPYAPNSLMSGSDHSLYTPGYPMQEIKPNLSFSVDDGFGNRSYGVQENGGGRLLFPFGDIKHLSAGLEVEHNKEQGNNSTGYWTGW

SEQ ID NO: 30756 - protein, 211 aa, Glycine max
  Clone ID: TF_GmC2047_1.pep
MQDPTAFQGVKPPQFPEQEQLKCPRCDSNNTKFCYYNNYNLSQPRHFCKNCRRYWTKGGALRNIPVGGGSRKTTKRSSSTLSKRSSAPSSSSAVSDPDPTRICTNPVDQDQRVLNIGGGSFSSLLASSGHFGTLLEGLNPSGSGLKMGEFVEGVSSDPGLNLDSGLNPDLQVQSNENSESFLGLQNGDSSCWNGTHGWSDLAIYTPGPSFQ

SEQ ID NO: 30757 - protein, 92 aa, Glycine max
  Clone ID: TF_uC-gmrominsoy244h03b1.pep
MVFSSIPVYSDPPNWQQQQQNQHQANGINSPQLLSPLPQPPQAPHVGVEAGQTRSGPMADRAKIPAQEGVLKCPLCESTNTKFCYFNNYSLS

SEQ ID NO: 30758 - protein, 75 aa, Glycine max
  Clone ID: TF_15814345.pep
LQSLERPLCQSYNTEFCYYIYYILSQPKHFCQACFRYWTAGGTLSHVPGGGACKTNKRANRPPLHGDSSSSAAML

SEQ ID NO: 30759 - protein, 324 aa, Glycine max
  Clone ID: TF_GmC384_2.pep
MHETHSIGGGRFYGGGDRRLRPHHQQQQPPPLKCPRCDSLNTKFCYYNNYNLSQPRHFCKNCRRYWTKGGVLRNVPVGGGCRKSKRSNKPKTTTTTTTSNTNNNRSSFSATAPATAPTPPAPELEHHSHSHSSSESSTLTVTATEEMSAPPPTTSNAPSKNSLLLDNDHREAKMFANPNPNPSLDSGGIFSEIGNFTSLINLNNNEAFGFGNNKNNNSILDATSFRFGISVTNQVQAAAGGGHGQWQQQNHQEFGTASFLDHTVPLEFSSLQHKTGHQGGFGSLDWQPGADQGLFDLPNTVDQPYWTHAHWSDQDNTSSLFHLP

SEQ ID NO: 30760 - protein, 271 aa, Glycine max
  Clone ID: TF_GmC503638_1.pep
MIEKWWKANNVEISPNCPRCGSTNTKFCYYNNYSSTQPRYFCKGCRRYWTKGGSLRNVPVGGGCRKSRSAKYNKTFRQANNSVGYSDDLMASPNSVVSDAPSIDLAQVYASFLNQKPDQAVQTVRYPNEPDYYSCLLNTTDFGHSALSEEELGLTDCLHFHEQSTESHFGESFQMYLFGFNSIHNHQEYYSSSYDTTNNTNFELPQLPGEETEISHGDMLWSKSNSEMMLDHALQASQPPLFGPQSHDADFIMGNCWSHFDLPRDASFSTL

SEQ ID NO: 30761 - protein, 309 aa, Glycine max
  Clone ID: TF_GmC684_1.pep
LLLLNNFFLSFFLLVLQQQNQHQANGSNSPHELLPPLPQPPQAPHVGVESEQIRSGLMADRAKIPAPEGVLKCPRCESTNTKFCYFNNYSLSQPRHFCKTCRRYWTRGGALRNVPVGGGCRRNKKNKRSRSKSPVSTEKPSLPNNTSAIPELIGRFPQPFMASLQSMNRYGVGINTGVNLREIQAQNASQMEFQIGGLGNGSSVATAGGGGGGGVEQWRFQQFPFLNGFESTSAASNSYPFQSEIVEGLVGDINATSSRITQLPARVKMEYNGGLNLSRSPLNVSENSNHFYSWTDLSGLASSSASHLL

SEQ ID NO: 30762 - protein, 341 aa, Glycine max
  Clone ID: TF_GmC384_1.pep
MLEIHSIGGGRFFGGGGDRRLRPHHQNHHQQPPIKCPRCDSLNTKFCYYNNYNLSQPRHFCKNCRRYWTKGGVLRNVPVGGGCRKSKRSNKPKTTTSAAATTSSNNNNNNPSSSSETAAATAPTPPQQPPPPLELEHNSHSHSSSESSTYTVAATEAMSAPTTNAVSNNNLLLDNNRESKMFANPNPYLEQSRSGGLFSDIESFSSLVNLNNQALGFGFGNNNSNISILDATSFRFGVSVTNPHGNDQVLAAPGGGHGQWQQQQQNHHEFGTASFLDHTVPLEFSSLQHKAGHQGGFGPLDWQPGGDQGLFDLPNTVDQPYWTHHTHWSDQDNPSSLFHLP

SEQ ID NO: 30763 - protein, 186 aa, Glycine max
  unsure (1)..(186): unsure at all Xaa locations
  Clone ID: TF_GmC245668_1.pep
ELVKARLAIELDPDSSGDHVLLSNVYAVAGKWKDVSSIRRTMTEHSMKKTPGWSMIEIDKVIYGFVAGEKPNEVTEEAHEKLREIMLRLRTEAGYAPQLRSVLHDIEEEEKEDSVSKHSEKLAAAFGIAKLPKGRILRIVKNLRVCGDCHTVMKLISXVYKVEVIVRDRSRFHSFKDGFCSCRDYW

SEQ ID NO: 30764 - protein, 68 aa, Glycine max
  unsure (1)..(68): unsure at all Xaa locations
  Clone ID: TF_jC-gmXLIB3563P006Da01d1.pep
RPRCETSNTKFCCCNNYSCAQPRHFCRACTRYXTRGGPLRNIPDGGGCRKNTRVKRTTXHGDSSASCC

SEQ ID NO: 30765 - protein, 373 aa, Glycine max
  Clone ID: TF_GmC593_1.pep
FPNLHSSLPLSLSFFLSLCSLNGAATREHGNTKRPRCHTRPKNHHHNNKASAGTRRKVPAMRLIQHKVLLLQQLQPHPAQALLQDLQKVLDQRRSLAQRPDRRRLQEEQKGRRQALFLFVIFITKTFNLGALPFPSRLNTNHHIPTIINTGLFNNNQLSPFLDVKSALFQLDAPPAALSNSLMGIAPPSAQNNNFWALGRSQSSTLSDPLNSTMQSMQQSLNVHSSLASSIESLSCVNRDLHLKMQQQRYATMMSGGDTHHKGDENSGVSFPQTVNGFENQKLVMNPVMFQKPVESLPAGSAVTEGPSGASVTTVAPPTEWFFGNSSFPSTGNGGGNGNNNINININDANNNWSDALAWGNFQQQQQQYSALP

SEQ ID NO: 30766 - protein, 250 aa, Glycine max
  Clone ID: TF_GmC166330_1.pep
MGLSSLHVCMDSSDHWLQGTIHEESGMDSSSSPSGDMLTCSRPMIERRLRPPHDQALKCPRCDSTHTKFCYYNNYSLSQPRYFCKTCRRYWTKGGTLRNIPVGGGCRKNKKVSAKKSNDHQLVNNNNINQTRPPHHHHPKDLQLSSFPDVQFSHLSNLLGTNANPSFMEGKYGIGMIENPRPIDFMMESKLEGIIGSGSSSRNNFDFFGNSDMSMGMTSVGLGDMNSTQNGLPPNFHHHGLSAFGGMSMS

SEQ ID NO: 30767 - protein, 348 aa, Glycine max
  Clone ID: TF_GmC584_1.pep
FFLPCSYFHHQLDDHKVFLGSNGGSSNNNNNKVLEKPGQDQLVQQQQQQQEAPKCPRCDSSNTKFCYYNNYSLSQPRHFCKACKRYWTRGGTLRNVPVGGGCRRNKRVKRPLITTNPSSAAIDTAASNNSSNSSSAPLQPPIDTASTSNHINPLFYGLPSSSSDVNLPLFSRFGSRISSSGFDLQLNNALGLGFSSGVLSNEASDNNGYRNWFGSNNTLLSSYTSTTSTTTPAMSSLLSSSLLQQKFMTDGVDSTNTFQHGLGLTPLEQLQMASDHSSEAGMVALKDVKVELGQNNRLEWNNGAACQSQIQHVGLYDPSLYWNNSAATALGVWNDQAANIGSSVTSLI

SEQ ID NO: 30768 - protein, 322 aa, Glycine max
  Clone ID: TF_GmC67052_1.pep
QEKEKSGLLTEDEALLLTPPTSSSPSLSPSCTTSITTSTATATSSNSENQNLRCPRCDSSNTKFCYYNNYNLTQPRHFCKTCRRYWTKGGALRNVPIGGGCRKSKSSGMSNSVAKQTATKMKAVASELGRSSSQGLLDQELPQTPAILWGSPQNSQLMALLRANQNHNPNPNPSPMSIVVKGEGNLMGSHHMVAEPLLANGLLNPRTSLGFDGVGEVLPSLGLCGSFWRNNQDQTQQQNNGFALGEHQSSGVQELYHKLRSSSSSINYCGSDNSPVFLSNMASSSSSLSNILESSSVSGSEFGCWNPTLSWSDLPTTNGAYP

SEQ ID NO: 30769 - protein, 297 aa, Glycine max
  Clone ID: TF_GmC494_1.pep
MDTAQWAQGIGVVKQPMEGSKPPPPPPPPMLERRARPQKDQALNCPRCNSTNTKFCYYNNYSLSQPRYFCKTCRRYWTEGGSLRNVPVGGGSRKNKRSTPPAPPSAPAPTKKLSDLATPNFPQSASQDPKIHQGQDLNLAYPPAEDYSTVSKFIEVPYSTELDKGTTGLHQNPTSSSTTTSASSQLSAMELLKTGIAAASSRGLNSFMPMYNSTHGFPLQDFKPPHGLNFSLEGFENGYGGLQGIQEGPTGGARILFPTVEDLKQQVPSTNEFDQQNRSQEGSAHGYWNGMLGGGSW

SEQ ID NO: 30770 - protein, 164 aa, Glycine max
  Clone ID: TF_GmC494_3.pep
KHPSLFACFVCFLPKTIFFSEAKVLNFSYGLLLSFCFYCFEKNWIFFQGIGVVKQPTMEGGSKPPPPPMLERRARPQKDQALNCPRCNSTNTKFCYYNNYSLSQPRYFCKTCRRYWTEGGSLRNVPVGGGSRKNKRSTSSAPPPSSASAQAKKLPDLTTPNFPQ

SEQ ID NO: 30771 - protein, 204 aa, Glycine max
  Clone ID: TF_LIB5118-054-A1-PF1-B4.pep
MDTAQWAQGIGVVKQPTMEGGSKPPPPPMLERRARPQKDQALNCPRCNSTNTKFCYYNNYSLSQPRYFCKTCRRYWTEGGSLRNVPVGGGSRKNKRSTPSAPPPSSASAQAKKLPDLTTPNFPQSASQDPKIHQGQDLNLAYPPAADYNTVSMSKLIEVPYNTELTRVAFIKTLLPHQHQHLHLLTISCLPWSFSRLLLLLPQV

SEQ ID NO: 30772 - protein, 304 aa, Glycine max
  Clone ID: TF_GmC108_3.pep
MRKQQQQQQQQTQPNSESLKCPRCDSTNTKFCYYNNYNKSQPRHFCRACKRHWTKGGTLRNVPVGGGRKNKRVRKSITTPITTSSTTTSITTTTSTCTATVTTSIGNNNNNMDAMLGCNSHMTIQTPLADDHKNMSSSLYQALIRPPPLLLQQQNLMNNTRDLEGKDFGIGIGNGNNGIFPSLTLPFPIHHQSQSLLFPFSTSSSSFDTNPCSVVSTSLRSSNVYNYGEDQFKAIEEPTINSTITTTTIVPSTNNTHHPWEIAAATSGVGLGTSSNSNYWNWEDFDSLVSTDLKDPWDGSDIKP

SEQ ID NO: 30773 - protein, 310 aa, Glycine max
  Clone ID: TF_GmC479_1.pep
MDPSSGQHQQMSSQSLENMLACSKAHQERKPTPQPEQALKCPRCDSTNTKFCYYNNYSLSQPRYFCKSCRRYWTKGGTLRNVPVGGGCRKNKRSSSSSSTSKRVQDQAFTPNVNPLTGLPSLMSYDSNDLTLALARLQKQSCGQLGYDDHDLSMLGNHHTNTPCGDNILGMHHHSSSSSTNPGFLDALRSGFLGTQSNNNMHQNMYYGYGNGDMGEVDNGGGVGVSSSGEMMMMMMPYNNDQEMSIASTQAVTVTTMKQEICNGREQKVLWGFPWQLNGDTNMGELDSGRASNWNGINSSWHGLLNSPLM

SEQ ID NO: 30774 - protein, 105 aa, Glycine max
  Clone ID: TF_GmC479_2.pep
MDPSSGQHQQMSSQSLENMLACSKAQQERKPRPQPEQALKCPRCDSTNTKFCYYNNYSLSQPRYFCKSCRRYWTKGGTLRNVPVGGGCRKNKRSSSSSSSTSKRV

SEQ ID NO: 30775 - protein, 112 aa, Glycine max
  Clone ID: TF_jC-gmro02910037e01a1.pep
MIQEMLGGASASHIPGERKISINNGGRGRALLLTPPTSSSSPSCTTSITTTGTGTVTLSNSENQNLRCPRCDSSNTKFCYYNNYNLTQPRHFCKTGRRYWTKSGALQNVPIG

SEQ ID NO: 30776 - protein, 51 aa, Glycine max
  Clone ID: TF_14258423.pep
MGRIMEKPSQDLFQQQQQALKCPRCDSSNTKFCYYNNYSLSHPRHFCKACK

SEQ ID NO: 30777 - protein, 300 aa, Glycine max
  Clone ID: TF_GmC384_3.pep
MQQIHSMPGGRFFSGSGSADRRLRPHHQNQQALKCPRCDSLNTKFCYYNNYNLSQPRHFCKNCRRYWTKGGVLRNVPVGGGCRKSKRSSKPNKITPSETASPPPPPHPDHNNNSNSHSSSESSSLTAAAATTTEAVSAPETLNSDSNNNNNMQESKLLIPALETNNSLEQGTGDCGGIFSEIGPFTSLITTTTSTNEPLGSGFGFGNSTLPDASSFQWHYQKVSSNNEELKLPENSFLDHTVDLSGMHSKTSHGGGFGSLDWQGGADQGLFDLPNTVDHAYWSHTHWSDHDNSSSLFHLP

SEQ ID NO: 30778 - protein, 291 aa, Glycine max
  Clone ID: TF_GmC730677_1.pep
STTSSGIFENPKTPSAETETSIPKSSTNGEKSEKSASEEKTLKKPDKVLPCPRCNSMETKFCYYNNYNVNQPRHFCKNCQRYWTAGGTMRNVPAGAGRRKNKNSSATVSHYRHIMFSEGLQGATLNAPNGLHNAVMTFGPDSPLCDTMASMLNIAERAQSCVPNGFHVTEPNSFVSYRKEEEEDGTSGHSTGVNSVATTSTLSHSGSHESLDKKVVEGFTPQFPYFPSAPWPYPIPPSTFFPQGYPLSLYTTPAYWSYMPPSWNNNISAISPESSINNSVSNPTLGKHSKD

SEQ ID NO: 30779 - protein, 258 aa, Glycine max
  Clone ID: TF_GmC196_2.pep
MHEIRDPAIRLFGQKIPFPEDVVVDKEEKEIESGEEREQEMEKYEDQGHKDAGVENVTEEELEVDPPPNAEETKNSGSSPEAIVNPKTPSIEEETEKSKGDKTEKEQGDAANSQEKTLKKPDKVLPCPRCKSMDTKFCYYNNYNVNQPRYFCKACQRYWTAGGTMRNVPVGAGRRKNKNSTSHYRHITISEALQAARIDSHLPPLKGNGRVLSFGLDAHAPICDSMASVNNLGEKKPLNCTRNGFHHGFEDQRLPPVP

SEQ ID NO: 30780 - protein, 145 aa, Glycine max
  Clone ID: TF_GmC190_1.pep
MAEAQSGQASEGIKLFGTTITLHGRERKEDRNDSEDGTEEIKRPDKIIPCPRCKSMETKFCYFNNYNVNQPRHFCKGCQRYWTAGGALRNVPVGAGRRKVKPQFGQEERLALDEWHVAAVAHGDFRQLFPSKRRRMSSGGQRQPC

SEQ ID NO: 30781 - protein, 83 aa, Glycine max
  unsure (1)..(83): unsure at all Xaa locations
  Clone ID: TF_uC-gmropic043a02b1.pep
MNPSRGRPQYRPMQSQEKKPKPQXQQAMKRPRXDSTNRKFCYYDTDSLTQAGCLCQSCTRYRAQXGTLRNVPLGGGCRKLRAC

SEQ ID NO: 30782 - protein, 185 aa, Glycine max
  Clone ID: TF_16343727.pep
MIKKTNTHYTKFRSQRDKDMEQEGEKGREEKRQIQQQQPPPQQHQKCPRCDSMNTKFCYFNNYSLSQPRHFCKACKRYWTLGGTFRNIPVGGGSRKVKRGKTNSPSSSSSSSSCSNLLSQPQQNLLMRPSPPPLTTNTMVQSTSPYYYNLGVGGNGYLSFHSSLNNNTPSQPSDQYLKVGDHSSP

SEQ ID NO: 30783 - protein, 66 aa, Glycine max
  Clone ID: TF_LIB3139-100-P1-N1-D12.pep
AHDIAYKKKLLFPGYKVHQGECFKKLACVLSKFVIHELNGTKPLGKVQNWELLSLPLIRNHHQPQP

SEQ ID NO: 30784 - protein, 51 aa, Glycine max
  Clone ID: TF_jC-gmXLIB3563P034ba06d2.pep
VSRGPSICSVLMGDHAKKHGLIHVVVVEVTGFSFYALAVGQGLYNQSIFRL

SEQ ID NO: 30785 - protein, 72 aa, Glycine max
  Clone ID: TF_jC-gmst02400020dg01d1.pep
LIVWFTPTYPGYYYAYIFNDQELQLSLRQANHTRCTDMTYDRLYIMILVIVQVSLLIGLVKNNQRGSLGLFH

SEQ ID NO: 30786 - protein, 367 aa, Glycine max
  Clone ID: TF_GmC239_1.pep
MRYVEDKGCYNNNGPTQETPNSSAMYSEFHKGKDATRVSNHHHRATMGKPTPSKWDDAQKWLVGLSKGGEKSHSKSKPRNSNADDLRLIAPVPQKEHDYSSSEKEEEENDACHDFMTNIISANAIAAQYEAEAKRVECDESNWGSNNNNNDNRFSGNTIQVQPICFRDMGTEMTPITSQEPSRTGTPIRATTPATRSPIHSGTSTPMRGQNGLQQVAEGGHGTTRKCGDQGSTSPCKKTHEDHQARKLSPLESRAMAWDEAERAKFMARFKREEVKIQAWENHQIRKAEMEMKKMEVKAERMKALAQERFANKLASTKRIAEEKRANAQVKLNDKALRTTERVEYIRRTGHVPSSFSFSFKLPSICW

SEQ ID NO: 30787 - protein, 70 aa, Glycine max
  Clone ID: TF_uC-gmflLIB3275P059b07b1.pep
VEVERIQGKAQDKLTNKLAAARHKAEEKRAAAEANRNHQAAKTEEQAEYIRRTGHVPSSYLSFSCCNWCS

SEQ ID NO: 30788 - protein, 133 aa, Glycine max
  Clone ID: TF_GmC356_3.pep
HRALFSGRGSEKVESWKKELSTQSSTWDVSETSKPASKTRSEEAKISAWENLQKAKAEAAIRKLEMKLEKRRASSMDKIMNKLRLAQKKAQEMRSSVPHNQTDRVVRTSHKASSFLRTSQMRSLSGCFTCHVF

SEQ ID NO: 30789 - protein, 210 aa, Glycine max
  unsure (1)..(210): unsure at all Xaa locations
  Clone ID: TF_GmC356_9.pep
ARGTNVSRATSRRDMATQMSPQGSSRSSPNLRPSFSASTPSTLPVTELRTAGSSKVDIRDVQVDEHVTVTRWSKKHRALFTGRGSEKVESWKKKNLPGENFPQNRAFGCRKAKKEKVSTQSSTWDVSETSKPAPKAKSEEAKISAWENLQKAKAEAAIRKLEMKLEKRRASSMDKIMNKRILAXKKAQEMRSSVSHNQTDRVVRTSPQGS

SEQ ID NO: 30790 - protein, 164 aa, Glycine max
  unsure (1)..(164): unsure at all Xaa locations
  Clone ID: TF_GmC356_6.pep
VWWVQRCGHQCVLCCFKEGHGNPDEPTGDVQVDEXLTVTRWSKKHRALFTGXRLRTSQKLEKRKSKHSIAKSEEAKISAWENLQKAKAEAAIRKLEMKLEKRRASSMDKIMNKRILAXRKAQEMRSSVPHNQTDRVVRTSHKASXFLRTSQMRSLSGCLTCHAF

SEQ ID NO: 30791 - protein, 611 aa, Glycine max
  Clone ID: TF_GmC44078_1.pep
MRMRELGFQERRSWRRRGGDTSPDSVIFTLESNLSLFSSASASVDRCSFASDAHDHDSLASEISLHLAAQDHDGDFAHSESWSGPDPDLDPNKRQQQRHADTDSDAAHTKHRRNRFSGKGEKAKVQKEEDSDGGDTEDGNQHLEFDSARNSFSLALKECQDRRSRSEALFKKHDRRRPASLDLNNAIGNGNVSSPHLGLSAMKKSTLCSRRSGSGTFPSPGTPNYLHATVAMQKGWSSERVPLHTSAARKQVGAALLPFNNGRTLPSKWEDAERWILSPVSGDGGTGRASLPAPQRRPKSKSGPLGPPGVAAVAYYSMYSPAVPLFEGANSRSFMAASPFSAAVSVPAAAADGLTASSGGSCGVLSTRTDPCMARSVSVHGCSQMHSQSSLPAQGEKFDGFKDAGTNVSPALSRRDMATQMSPEGSSCSSPSLRPSFSASTPPSLPLSEFTSLPFSKMDIRDVPVDEHVTMTRWSKKHRALFSGRGSENVDSWKIKESSSRSSSWDISEGSKTVSKAKRVEAKINAWENLQKAKAEAAIQKLEMKLEKKRASSMDKIMNKLRLAQKKAQEMRSSALANQPHHVPRTPHKAILFSRASQMGSLSGCFTCHAF

SEQ ID NO: 30792 - protein, 78 aa, Glycine max
  Clone ID: TF_jC-gmXLIB3563P059ca07d2.pep
PLFFGSVGDKKKRLYFHASSWFLTVPDARVFSVYYVGHKDICSLFMRQKRLSGVCIPSGLEAKRNLIIQSVYEFSFAR

SEQ ID NO: 30793 - protein, 81 aa, Glycine max
  Clone ID: TF_LIB3242-386-Q1-K1-A4.pep
KFSRQRKKLQNPGQLEPLQKRPWEGFKILIPFLGGGALGPRSKQKRKFWLKKFQGWFLKGGYGGAKRKGGPYEVCDKQNSL

SEQ ID NO: 30794 - protein, 77 aa, Glycine max
  unsure (1)..(77): unsure at all Xaa locations
  Clone ID: TF_4276934.pep
AKKALFEADLNKIXKELEKKKAEAAEKIKSKIAAIPKEVEERRAIIXAKKGEDFFKAEGQAAKYKATGPAPKKLLGC

SEQ ID NO: 30795 - protein, 85 aa, Glycine max
  unsure (1)..(85): unsure at all Xaa locations
  Clone ID: TF_uC-gmflLIB3260P014a10a1.pep
KTPVPADKHFSRGSFDRKISLADLDKEKELFYVNAWEERDNAKSDNRPYKHLSFIDAWENSXKAAFETELKKLDEQLEKKKAEFX

SEQ ID NO: 30796 - protein, 71 aa, Glycine max
  Clone ID: TF_uC-gmflLIB3260P018a07b1.pep
ADPTKIEEELEKNKAEAAEKIENKVATIHKEAEERRTIIEAKKGEDLLKAEEQAGEYGATGTATKKLLGCF

SEQ ID NO: 30797 - protein, 348 aa, Glycine max
  unsure (1)..(348): unsure at all Xaa locations
  Clone ID: TF_GmC356_4.pep
ECQDRRSRSEALLKRLXSLDLNNASGSGSLPRLQTLKKTSISSRRSGTATFPSPGTLNYRVAMHKGWSSERVPLHAGATRKHVLPFNNGKTLPSKWEDAERWILSPVSADGTGRASLNAPQRRPKSKSGPLGPPGVAYHSMYSPAAPVFEVGNGGSFMEGSPFTGDGLIICTSSLHALCSALGGPRLTESVIINAXQEDKFGGFKDVGTNVSRATSRRDMATQMSPQGSSRSSPNLRPSFSASTPSTLPVTELRTVGSSKVDIRDVQVDEHVTVTRWSKKHRALFTGRGSEKVESWKKELSTQSSTWDVSETSKPASKTRSEEAKISAWENLQKAKAEAAIRKLEVTS

SEQ ID NO: 30798 - protein, 386 aa, Glycine max
  unsure (1)..(386): unsure at all Xaa locations
  Clone ID: TF_GmC17975_1.pep
MKKSSSSSFQNLGSFPSPGAPYYRERNIRSQKGWCSERVSNSKLSTSASSISRRHTMAGLITTPFCGGRTLPSKWDEAERWICSPVSAYAESRSCSHAQLQRRPKSISGPIVPPGVASFYSNQGLVVRNLVVGSPFSTGVLAPVAVSVHHFDAHDGNVFGYDLDSGMQFSRPXINENGMVLSSLSTAEPRALTPDEKHDGTMNGENVASHSSRCDKGTQMSPGEIENDSHSSPKSCATSIVDQQQCHSSKLEVRDVEVDSQATIVRWSKRHATKLAKKDTLHSKDLREISAEAQASWDIDESNIDTSKLQREEAKIIAWENLQKAKAETAIRKLEMKLEKKRSSSTDKILNKLRRAQLKAENMRSSIPVQQSHQVSKCRIVRENRL

SEQ ID NO: 30799 - protein, 411 aa, Glycine max
  Clone ID: TF_GmC3689_1.pep
MKKSSGSSQKLGSFLSPGAPNYSEKSIGSQKGWSSERVLLQPSSSNIRNASVANLTPFNSGRTIPSKWDDAERWICSPVSGYSNNKTNSYAQLQQRRPKSKSGPIMPPGTGYYSNYSPTIPLRQGLVVKNFMMGGSPFSTGVLAPDAISLHHYYSHEAVFGHRYDFDNSMQCSSPLLNENSVALPSVSSAPMWSELLCDPSSPNSQDEKRKETKNADDVTSLSKCDKGTQMSPPETENDAPKSSPNSTMDQQNYLSAKLEVRDVEIDREATTVRWSKSHVPKLSLLPGIHSRKSSRTEAKASGLDIADSTLDSSKIQREEAKIVAWESLQKAKAEAEIRKLEMKLEKKKSSSMDKILNKLRRAQMKAEKMRNQITVQEGQQVSNTRKVFSFHKYAQIWSPRSCFGTHALHD

SEQ ID NO: 30800 - protein, 88 aa, Glycine max
  unsure (1)..(88): unsure at all Xaa locations
  Clone ID: TF_LIB4390-036-R1-N1-B12.pep
IPPKNIPALKKDGLPLFKTLGFKPGPLKKKKPEFGVKIKNKIPFVPHPPEGKRPMVXPQRGEKIFKAEEKVAKPRATGTSPKKALGGF

SEQ ID NO: 30801 - protein, 44 aa, Glycine max
  Clone ID: TF_uC-gmrominsoy183f05b1.pep
VNTQAEERRALVEAKRAEQIRKAKERAAKDRAAGSSTKKASGCF

SEQ ID NO: 30802 - protein, 55 aa, Glycine max
  Clone ID: TF_LIB3108-040-QI-K1-C4.pep
HASAHASAETQEVAEVKPTEGSVNRDAVLARVATEKRLSLIKAWEESEKSKAENK

SEQ ID NO: 30803 - protein, 329 aa, Glycine max
  unsure (1)..(329): unsure at all Xaa locations
  Clone ID: TF_GmC302979_1.pep
LLKQIRTKLTGAEEKNKADLGGSRDQKVTHRKPXSFKDKKKAQNWFQRQFSRTMSHDYDAEMELATFFAAAAFAIFSLEGSLIPQQKKKRETPLTRGKSKVDDTKPPISQFGGTSRQFSVDLKRPEKTMTPAPSMRRSSTFGEKVKSSTDGKKPEIQAPKRTTTFGDEHSVNTGEIKPETPLPRVAPPVHQQMPLRPPPPPLPPPPPPPIRQTSARPGTNGTKADAWEREELEKIKERYEKLLETIDSWEKRKKAKAIRKLNKHQHSESERKRAKVLKKYQDKMSYISQIAGGARAQAEERRRSXVLKAKEKKNIIRTTGKIPGPCSCF

SEQ ID NO: 30804 - protein, 85 aa, Glycine max
  Clone ID: TF_701100625H1.pep
WALISALDFSLSSQAFTLDNRFSFSNSSKTIFLSGIHLKPFFFTGSGIFSFSFSFSTITRALVSSAAAGTGVAPPPLSSRARSYS

SEQ ID NO: 30805 - protein, 198 aa, Glycine max
  Clone ID: TF_GmC1419_1.pep
MAELQTKVEPVTVPAPAPVDPEPPLAEAPPLEKKAVAVPPPVPAAAEETKALVVVEKENEKIPEPVKKNASGGSLDRDIALAEIEKEKRLSNVKAWEESEKSKAENKAQKQLSAVAAWENSKKAALEAQLRKIEEQLEKKKAEYGEKMKNKIALVHKQAEEKRAMVEAKRGEEILKAEEIAAKHRATGTSPKKAFGCF

SEQ ID NO: 30806 - protein, 540 aa, Glycine max
  unsure (1)..(540): unsure at all Xaa locations
  Clone ID: TF_GmC682_1.pep
MEYERIEKVQAGIISPSKLRMKLLGPLHHRKKDGSNSNSSRTSPSRIEDAEFVNSLLGSKNDNLDDEVTSPSLDVLSLKPSSDAVLDRRQNGQISYEPKETMPKENSDTGRVKMQHFQKVDTRSSSAIHAVRAIEDENLDYDSNASSSSFEFDKGERPGNNPATRPYXRPIPSKWNDAEKWIMNRQNIQANHSKKNTCHNQANRMPTNMGRVAPESGNYDHKLPTGKATETKRVDFCQPTSHMGFEKFSFVPSDAHSVSGQAHGRNPVVESLPQSKDLKDVNELGLCCSRSTDDQSVMPGIRSVAMRDMGTEMTPVPSQEPSRTATPVGSATPLRSPVSSMPSTPRTGAPAPTPLDNTTNEDSQFPVENGKRHLSEEEMKIKTRREIAALGVQLGKMNIAAWASKDEQEKNKSSPRDMSVQEQERIEFEKRAALWEEAEKSKHTARFKREEIKIQAWESQQKAKLEAEMRRIEAKVEQMRAQTHAKMVKKIAMARQRSEEKRAAAEARKNREAERTVAQTEYIRQTGRLPSSNYICCGWL

SEQ ID NO: 30807 - protein, 112 aa, Glycine max
  Clone ID: TF_GmC1419_2.pep
LFLFFYCVCLYVKKLLFSVNRAQKQLSAVAAWENSKKAALEAQLRKIEEQLEKKKAEYGEKMKNKIALVHKQAEEKRAMVEAKRGEEILKAEEINAKHRATGTSPKKAFGCF

SEQ ID NO: 30808 - protein, 183 aa, Glycine max
  Clone ID: TF_GmC129326_1.pep
MAELQSKSETAPAPAPVVAEVPSNDAVAKKASETGESKAIVSVSEKTPVPANKQSSRGSIDRDIALAEVEKEKKLSYVKAWEESEKAKAENRAQKHLSAIAAWENSKKAALEAELKKLEEQLEKKKAEYGEKMKNKVALVHKEAGEKRAMIEAKRGEEILQTEEMAAKYRATGTTPKKTIGCF

SEQ ID NO: 30809 - protein, 72 aa, Glycine max
  Clone ID: TF_GmC708611_1.pep
ASSWMKKVERKLEEKRARALEKMQNDVAKAQRKDEERKASAEAKRGTKVARVLEIANLMRAVGRAPTKRSFF

SEQ ID NO: 30810 - protein, 109 aa, Glycine max
  unsure (1)..(109): unsure at all Xaa locations
  Clone ID: TF_5820122.pep
QRFESEKRLALIRAWEESEKTKAENRAYKRHNAVVLWENSKKXCEAHLKRIEEKLDRNKAKCVEKMQNKVAEIHRTAEEKRAMIEAYKGEEFLEIEEKAAKFRTRGYSP

SEQ ID NO: 30811 - protein, 194 aa, Glycine max
  Clone ID: TF_GmC1744_1.pep
MTEEQSKKVAETESFPSNPAPEPVVVPKEDVAEEKSVIPQPSPSPADESKALVIVEKTSEVAEEKPIEGSVNRDAVLARVATEKRLSLIKAWEESEKSKADNKSHKKLSAISAWENSKKAAAEAELRKIEEQLEKKKAEYGEKLKNKIATIHREAEEKRAFIEAQKGEEFLKAEETAAKYRATGTAPTKLFGCF

SEQ ID NO: 30812 - protein, 67 aa, Glycine max
  Clone ID: TF_jC-gmXLIB3564P117ab02a1.pep
RIKKNLKKKRPKLQKKLKTKFVPFPRELKKKKPIIRPKKGKVFFRPKNQLPKNKPLGPVPKKPLGGF

SEQ ID NO: 30813 - protein, 94 aa, Glycine max
  unsure (1)..(94): unsure at all Xaa locations
  Clone ID: TF_jC-gmst02400020g01a1.pep
QRSNPGRWLRLTSRPSNPAPEPAVCAKEDVAEEKSAIDTPXPSSADEINAVVIAAKTSVAAEKKPIEGSAHRDAALARDATEXRLSLIKAWEES

SEQ ID NO: 30814 - protein, 270 aa, Glycine max
  Clone ID: TF_GmC1351_1.pep
FAWRWRTEIFSLSQHNLSLAIQNETTFVPPPSTARSVSMRDMGTEMTPIASQEPSRTGTPVRATTPMRSPNSSRPSTPPRASPASTLTDLHSDNLNLNMNELSEKELQMKTRREIMVLGTQLGKMNIAAWASKEEEDKDASTSLKTKAELPKSVVEARAAAWEEAEKAKYMARFRREEMKIQAWENHQKAKTEAKMRKIEVEVERIQGKAQDKLTNKLAAARHKAEEKRAAAEANRNHQAAKTEEQAEYIRRTGHVPSSYLSFSCCNWCS

SEQ ID NO: 30815 - protein, 69 aa, Glycine max
  unsure (1)..(69): unsure at all Xaa locations
  Clone ID: TF_9565963.pep
KAKPADVQADLQQIAEALQQKKVHVVDKITTTIAAIYKEXAETTVIIQVKKGEDLFKVEEXAVKYRATG

SEQ ID NO: 30816 - protein, 153 aa, Glycine max
  Clone ID: TF_GmC239_2.pep
GSQHVAETTRKCGNGEGSTSPCKRTHEDHQARKLSPLESRAMAWDEAERAKYMARFKREEVKIQAWENHQIRKAEMEMKKMEVKAERMKALAQERFTNKLASTKRIAEEKRANAQVKLNDKALRATERVEYIRRTGHVPSSFSLSFKLPSICW

SEQ ID NO: 30817 - protein, 138 aa, Glycine max
  Clone ID: TF_LIB3242-271-Q1-J1-H11.pep
MGEEVSSKTEPELHCVDSVPEEHNSSVQEKELEKPEPPNDKVTPPSPAAAQEVADHASKKDTEESLDKDAMLARVVTEKRLALVKAWEESEKTNAENRAYKRLSAVGFWEDSKKASVEAQLKKIEENLEKKKAEYVEK

SEQ ID NO: 30818 - protein, 190 aa, Glycine max
  Clone ID: TF_GmC989_1.pep
MGEEVSYKTEPESELHSVPQEHNSSAQEKELEKPEPPNDKVTPPSPVAAQEVADHASKKDTEESVDKDAMLAKVLTEKRLALIKAWEESEKTKAENRAYKKHSAVGLWEDSKKASVEAQLKKIEESMEKKKAEYVEKMKNKIAEIHRLAEEKKAIVEAQKREEFIDLEETASKFRSRGDVPRKFFACFGG

SEQ ID NO: 30819 - protein, 271 aa, Glycine max
  unsure (1)..(271): unsure at all Xaa locations
  Clone ID: TF_GmC80032_1.pep
MNNNPTTIIGSTTHGSEEEDEHITEIREIHALTPPPPRGRAWETVHTHRSSSLSVASEGGASSSENFSMSREFSALVLAGSSIDHDNSNNNNSNSPMNENNNSNSLLGRIREEDLMEETNPLAIVPDNHPLDPVPSSSSQGVRGGGAAREEHVSVQRVKKEEVDAKISAWQNAKVAKINNRFKREDAVINGWESEQVQKASSWMKKVERKLEEKRARPMEXMLNVIAKAHRKAEERRASAKAKRGSKVARVLEIASLMRAEERPPAKKSFL

SEQ ID NO: 30820 - protein, 160 aa, Glycine max
  unsure (1)..(160): unsure at all Xaa locations
  Clone ID: TF_GmC1419_3.pep
MAELQTKGEPVTVPAPVDPEPPLAEAPPLEKKAVAVPPPVPAAAEETKALVIVEKEKENEKIPEPVKKNASGGSLDRDIALAEIEKEKRLSNVKAWEESEKXKQNMVKKMKNKIALVHKQAEEKRAMVEAKRGEEILKAEEIAAKHRATGTSPKKAFGCF

SEQ ID NO: 30821 - protein, 96 aa, Glycine max
  unsure (1)..(96): unsure at all Xaa locations
  Clone ID: TF_uC-gmroLIB3259008h06a1.pep
HLSAIAAWEISTKAALVAELKKLEDLLEKKKAAYGEKMKNKVALVXKKHRSKGPLFXAQRGVKILQPKEKGAKFLSTRTPSKKNIGRLSIFKKFWF

SEQ ID NO: 30822 - protein, 205 aa, Glycine max
  Clone ID: TF_GmC6783_1.pep
MTEEQTKTAESESVTPPPAAAPSQAPPAAEAEHVPEAPKDVTEEKSVIPVPSSDDKPDESKALVLVEKTQEVAEVKPTEGSINRDAVLARVATEKRLSLIKAWEESEKSKAENKAHKKLSSVSAWENSKKAAVEADLKKIEEELEKKKAEAAEKIKNKIAAIHKEAEERRAIIEAKKGEDLLKAEEQAAKYRATGTAPKKLLGCF

SEQ ID NO: 30823 - protein, 57 aa, Glycine max
  Clone ID: TF_19271195.pep
IHGQRLYMTMEQRRYFREEYGIETWTFIQKLRDAVFMRVGLALYVINQDGCIKAALE

SEQ ID NO: 30824 - protein, 110 aa, Glycine max
  Clone ID: TF_LIB4167-010-Q1-N1-C2.pep
FVALIEFHHLCIYAFEEPFTGVEPWTFIQNLGEAVFIPAGCPHQVRNLKSCIKVALDFVSPENIQECIRLTEEFRSLPKNHKAKEDKLGVKKMCLYALRKAADDLEKLEG

SEQ ID NO: 30825 - protein, 62 aa, Glycine max
  Clone ID: TF_jC-gmXLIB3563P024bc05d1.pep
KLQVLKVGKISLYAASSPIKKVQKLVLAPKVGAEIVYGAPILTAMVSENYEKMVNRRQITCA

SEQ ID NO: 30826 - protein, 162 aa, Glycine max
  unsure (1)..(162): unsure at all Xaa locations
  Clone ID: TF_uC-gmflminsoy058h11b1.pep
FGPKTYIAYGIKEELGXGDSVTKLHCDMSDAVNILTHTAEVILTDEQHFTISKLKEAHRAQNEREQCAQERVADHLEDRPYKDNKEHIENKEVLEAKSMKKQPIEIDGNIFPNNVLERYTSPATENESMETGSALWDIFQREDSEKLETYLKKHSKEFRHTY

SEQ ID NO: 30827 - protein, 233 aa, Glycine max
  Clone ID: TF_GmC385_1.pep
MVEGMNFFRRVNRTSCISTEAKKVSSQSMDSNGECDFISDSDSGSALLLLGTVQTAELSEHDNPRNPFKSSKRHKNKFTEHLGAQWDVFRRQDVPKLIEYLERHYDEFSYTHDYHKKMVHPILDQSIFLDSTHKMRLKEEFKIEPWTFQQHVGQAVVIPAGCPYQIRNSKSSVHAVLEFVSPENVTEGIQLFDEVRLLPEDHKAKADMLEVKKMALHSMNTAIKEVRQLTSKT

SEQ ID NO: 30828 - protein, 216 aa, Glycine max
  unsure (1)..(216): unsure at all Xaa locations
  Clone ID: TF_LIB4366-001-Q1-K1-C4.pep
IPCPKVNDECNHGFLELRSILGQHFVSELVCKAKELVQAYKLQNVVKTADNFCSCLKLDRNTDVSYSNMRKAASREDLTDNYLYCPKAVDLQYKDLRHFQWHWEKGEPVIVSNVLECTSGLSWEPLVMWRALRHVTNTKRGQHLAEKTIDCLDWTEGEINIHQFFTGXYTNGRKDWLAWPQILKLKDWPPSNLFEEQLPRHCXEFISSLPFKEXTD

SEQ ID NO: 30829 - protein, 227 aa, Glycine max
  Clone ID: TF_GmC713485_1.pep
PRVRVHSLIDDDDRVYCDNCNTSIVNFHRSCPNPNCQYDLCLTCCMELRNELHCEEIPASGNERTDDTPPVTAWRAELNGGIPCPPKARGGCGTTILSLRRLFEANWVHKLIKNVEELTVKYQPPNIDLSLGCSMCHSFEEDAVQNSVRKAASRETSHGNFLYCPDAIKMEDTEFEHFQRHWIRGEPVIVRNVFEKGSGLSWHPMGMGRALFSLLGLHHLIPTFSHR

SEQ ID NO: 30830 - protein, 281 aa, Glycine max
  Clone ID: TF_GmC139142_1.pep
QIQEEQIEAKLLGKSSFEIEIHQSLCGDGERVYCDHCATSIIDLHRSCPNCSYELCLSCCQEIRDGSITPRAELKFPYVNRGYDYMHGGDPLPVPCDLETSEGHIEPSTVWNAKSDGSISCAPKELGGCGSAVLELRRILPDGWISDLEAKARNMLKIWEIEHTTLQQKEAVSSFTFLRKEAIREGINDNNIYYPESSNTQKEGLLLFQKHWANGEPIIVRDVLKQGTGLSWEPMVMWRALCENMVSEISSKMSEVKAIDCLANCEVWSRCPFGAEFEHLV

SEQ ID NO: 30831 - protein, 53 aa, Glycine max
  Clone ID: TF_LIB3051-035-Q1-K1-F2.pep
VRLADALRCVPNEHEAKLQVVEVEKISLYASSSSITELQKLVLDPTLVAQIGS

SEQ ID NO: 30832 - protein, 269 aa, Glycine max
  Clone ID: TF_GmC484_2.pep
MMQKAKANKEFEAKESHGDPQISSRGSSPDSSLGTKSSGLEIDSNQNKSIMDQGFEIYSSAEGNTANCKLPFNQNGDVSEKTHPGVLWDVFRRQDVPILTKYLKIHWKEFGKSDDLGNEFVEWPLYDGAIFLDKHHKRKLKEEFGVEPWSFEQNLGEAIFVPAGCPFQARNVQSNVQLGLDFLSPESVGDAVRLAEEIRCVPNEHEAKLQVLEVGKISLYAASSAIKEVQKLVLDPKLGAQIGYGDPNLTAMVSENYEKMVKRRQITCA

SEQ ID NO: 30833 - protein, 104 aa, Glycine max
  unsure (1)..(104): unsure at all Xaa locations
  Clone ID: TF_GmC4885_8.pep
VNVLTHIAEVKLDSDQLTVIEKLKQKHLEQEKRELLGDDQDGEANVDMLXNSSSTINALDRQNGALWDIFWRQDVPKLQEYLKKNFREFRHVHCCRLKQGKLLK

SEQ ID NO: 30834 - protein, 68 aa, Glycine max
  Clone ID: TF_LIB3139-086-P1-N1-A7.pep
MEWPACTDEYEKLIIRMNTPRVVIDNSVFSSATLVKVDSARRHGILLDAVEVLADLNLSIKKAYISAD

SEQ ID NO: 30835 - protein, 951 aa, Glycine max
  unsure (1)..(951): unsure at all Xaa locations
  Clone ID: TF_GmC484_1.pep
GIIPFASLPQFSNARSANVDYNALRIPDDLRYKRFDGMPLRCTSMSVTDKTVCEKHYIQAKKRAPNSGMRANIHKAKRKSQSLWLKXSDYVYMESKGDVFYVTLSSIGLTQKKLSKNQFRYEPERDAPRRGSSARRSSNLNDDDDDDDDDDVDGDADADVALYEEENWVSCDSPPDSSRKRSRRSLEANATTEYSDGTSAGSSDEDTGGQTCHQCRRNDRDRVTWCQRCDRRGYCDSCLSTWYSDISLDEIQRICPACRGICNCKTCLRSDNSIKVRIREIPVLDKLQYLHVLLSSVLPVVKQIHCEQSFEVELEKKLRGAEIDLPRIKLNSDEQMCCNFCRIPITDYHRRCPSCSYDLCLSCCRDLREATADHNKEPQTEQAKTSDRNILSKFPHWRSNDNGSIPCPPKECGGCGYSSLNLSRIFKMNWVAKLVKNVEEMVSGCRISNADGPPETGLNDLKLCQYSHREASDDNYLYCPASDDIKTDGIDNFRKHWKTGEPIIVKQVFDGSSISSWDPMVIWRGILETIDEKAKDENRMVKAIDCLDGSEIDIELAQFMKGYFEGLILENGWPQLLKLKDWPSPSASEEFLLYQRPEFISKLPLLQYIHSKWGLLNVAAKLPHYSLQNDVGPKIYISYGISDELGRGDSVTNLHFNMRDMVYLLVHTNEVKLKDWQRTKIEMMQKAKANKEFEAKESHGDPQISSRGSSPDSSLGTKSSGLEIDSNQNKSIMDQGFEIYSSAEGNTANCKLPFNQNGDVSEKTHPGVLWDVFRRQDVPILTKYLKIHWKEFGKSDDLGNEFVEWPLYDGAIFLDKHHKRKLKEEFGVEPWSFEQNLGEAIFVPAGCPFQARNVQSNVQLGLDFLSPESVGDAVRLAEEIRCVPNEHEAKLQVLEVGKISLYAASSAIKEVQKLVLDPKLGAQIGYGDPNLTAMVSENYEKMVKRRQITCA

SEQ ID NO: 30836 - protein, 808 aa, Glycine max
  Clone ID: TF_GmC484_3.pep
RVRASNLNDDDDDDDDDVVVDVDGDGDGDAALYEEENWVSYDSPPDSSRKRSRRSSEANADSDGTSAGSSDEDTGGQTCHQCRRNDRDRVTWCQRCDRRGYCDSCLSTWYSDISLDEIQRICPACRGICNCKTCLRSDNSIKVRIREIPVLDKLQYLHVLLSSVLPVVKQIHCEQSFEVELEKKLRGAEIDLPRIKLNSDEQMCCNFCRIPITDYHRRCPSCSYDLCLSCCRDLREATADHNKEPQTEQAKTSDRNILSKFPHWRSNDNGSIPCPPKECGGCGYSSLNLSRIFKMNWVAKLVKNVEEMVSGCRISNADGPPETGLNDLKLCQYSHREASDDNYLYCPASDDIKTDGIDNFRKHWKTGEPIIVKQVFDGSSISSWDPMVIWRGILETIDEKAKDENRMVKAIDCLDGSEIDIELAQFMKGYFEGLILENGWPQLLKLKDWPSPSASEEFLLYQRPEFISKLPLLQYIHSKWGLLNVAAKLPHYSLQNDVGPKIYISYGISDELGRGDSVTNLHFNMRDMVYLLVHTNEVKLKDWQRTKIEMMQKAKANKEFEAKESHGDPQISSRGSSPDSSLGTKSSGLEIDSNQNKSIMDQGFEIYSSAEGNTANCKLPFNQNGDVSEKTHPGVLWDVFRRQDVPILTKYLKIHWKEFGKSDDLGNEFVEWPLYDGAIFLDKHHKRKLKEEFGVEPWSFEQNLGEAIFVPAGCPFQARNVQSNVQLGLDFLSPESVGDAVRLAEEIRCVPNEHEAKLQVLEVGKISLYAASSAIKEVQKLVLDPKYANFRLVLAIALTWRPDRLWRS

SEQ ID NO: 30837 - protein, 250 aa, Glycine max
  unsure (1)..(250): unsure at all Xaa locations
  Clone ID: TF_GmC4885_4.pep
SALVLLYFSRSPLFASRFSRPAVDPQYKDLRHFQWHWEKGEPVIVSNVLECTSGLSWEPLVMWRALRHVTNTKHGQHLAEKTIDCLDWTEVLVKCRXEINIHQLFTGYTNGRSDWLAWPQILKLKDWPPSNLFEEQLPRHCAEFISSLPFKEYTDPHKGSLNLAVKLPNGSLKPDLGPKTYIAYGFPQELGRGDSVTKLHCDMSDAVNALTHIAEVKLDSDQLTVIEKLKQKHLEQEKRELLGDDQGWRN

SEQ ID NO: 30838 - protein, 90 aa, Glycine max
  Clone ID: TF_GmC4885_7.pep
SKIFQTSIPFYSSSLTESLQNKIKAQRPIHPKVNHPKLSEILLQIFLQLRDILSPKNIPESTICPRVRPRVRFKTCCLRSFNKRLNFSPR

SEQ ID NO: 30839 - protein, 105 aa, Glycine max
  unsure (1)..(105): unsure at all Xaa locations
  Clone ID: TF_jC-gmXLIB3563P053dh04a1.pep
IKQVINLIHEQTFYLTMEHYNKLKEDLGIQPWTFAQKRGYAVVNASGCPXQGRNRMSCIKVALNCVSSINVGECFSLTEELHPISMNHRSTDDYLEVKNKSLYAV

SEQ ID NO: 30840 - protein, 292 aa, Glycine max
  unsure (1)..(292): unsure at all Xaa locations
  Clone ID: TF_GmC19373_1.pep
PEMLKLKDXPPPDXFEDLWPGHCDEFIRSLPFQEYSDPRTGILNLAVKLPAHVLKPDMGPKTYIAYGIKEELGRGDSVTKLHCDMSDAVNILTHTAEVILTDEQHFTISKLKEAHRAQNEREQCAQERVADHLEDRPYKDNKEHIENKEVLEAKSMKKQPIEIDGNIFPNNVLEXIVHPIHDRCFYLTWEHNKKLNKELGVEPWTFEQKLGEAVFIPAGCPHQVRNLKSCTKVAVDFVSPENIHECLRXLTKKFRQLPKNHKAREDKLEIKKMIVYAVDQAVKDLKDLLKCS

SEQ ID NO: 30841 - protein, 367 aa, Glycine max
  Clone ID: TF_GmC2494_1.pep
MQFKTCTNDDYEKGRISAMHLMKDKFCSIYDQSDTRSVFDDLNLPTPQARVNQEHQKNYIEQSRFKSRCIHFEELPYYSGKNVSDLLFPQEQFSQHYFSVCGNGVDNTVLQDVTDTGGDFPLDESYGQDPDNDIGGYPNTSESHLPCTSTEDTKFVNGLNSLDTPCSDINVEKIESVKNDTSSNNFCQNDDHLETQYGSAVWDIFRRQDVPKLTEYLKKHHREFRHINNLPVNSVIHPIHDQILYLNEKHKKQLKQEFGVEPWTFEQHLGDAVFVPAGCPHQVRNRKSCIKVALDFVSPENVQECIRLTEEFRLLPKGHRSKEDKLEIKKMALYAADVAITEATKLMRGNDMSDEAKEVPQQHIFTK

SEQ ID NO: 30842 - protein, 77 aa, Glycine max
  Clone ID: TF_jC-gmXLIB3563P073dg09a1.pep
FWFQGFLNCANGSVFPISKMDLFQIFSQYWNILPAKNIPKNSRMCFLKDISILCERKFTIGRITFSTRINFKPLIHD

SEQ ID NO: 30843 - protein, 217 aa, Glycine max
  Clone ID: TF_GmC1074_1.pep
MENGGNLCDGKEVDQFYQPSGGIEVVVANEDGLSCGSDLKEIDKVKIIQESDLFRGDASEGALWDIFRRQDVPKLQEYLKKHFREFRHIHCCPLKQVIHPIHDQTFYLTMEHKKKLKEEYGIEPWTFTQKLGDAVFIPAGCPHQVRNLKSCIKVALDFVSPENVGECFRLTEEFRTLPINHRSTEDKLEVKKMTIYAMQEVITKLEKARSRQTIVPK

SEQ ID NO: 30844 - protein, 58 aa, Glycine max
  Clone ID: TF_uC-gmroLIB3259142b10a1.pep
WGQENIFLINFGGRYLVKKTFWKRWSKWEVLTKKFLWETQKGKPSFLRAFDFQIKIPT

SEQ ID NO: 30845 - protein, 112 aa, Glycine max
  unsure (1)..(112): unsure at all Xaa locations
  Clone ID: TF_GmC28720_5.pep
MQPNVISSKSSSDSENFAESQLVPKMPKQASEEPKKKKKVKLPLPLVPADNNQNASQPVRKCMHCEITKTPQWRAGPMGPKTLCNAXGVRYKTGRLFPXYRPAASHFLPIWH

SEQ ID NO: 30846 - protein, 115 aa, Glycine max
  unsure (1)..(115): unsure at all Xaa locations
  Clone ID: TF_GmC138242_1.pep
TPQWRTGPMGPKTXCNACGVRYKSGRLVPEYRPAASPTFVLTKHSNSHRKVXELRRQKEMVRSQQHHHQHQQQFLQHHXXXHHHYQHHQNMMFDVSNGDDYLXHQPVGPDFRQLI

SEQ ID NO: 30847 - protein, 67 aa, Glycine max
  Clone ID: TF_LIB3242-054-Q1-J1-C5.pep
VEALNGGAHSLRRSSHCQVHYTPQWITGPLGPNTLWNAGGVRLKSGRLFRECRPSCGPTVCDDLHCN

SEQ ID NO: 30848 - protein, 94 aa, Glycine max
  Clone ID: TF_18848585.pep
TPAARLPQDEDHNKPHRHQPRSGVTRFCWDLLHSNHNNNNITQSQGKSSITGSNNNNDSLLARRCANCDTTSTPLWRNGPRGPKVYHHIQSSYL

SEQ ID NO: 30849 - protein, 56 aa, Glycine max
  Clone ID: TF_15201384.pep
ANGDDCLLCATDNTPQWLNAPMGPKTLCNSRGGLVQTGLLVPHDTTAARPTLVLTK

SEQ ID NO: 30850 - protein, 144 aa, Glycine max
  Clone ID: TF_GmC1320_6.pep
DPCTNNRELRELGNQETREEHHVINRGLTFTRLGMRHQKGLSWITKLRNALQSSENKTRGQGHQAHRGLFLFPQHLPPLLLSLPRTSPSLPIPWVQLVLLSRVVSWWFCNQRNISFSHSHSDPSFPILFTRSICKQHHNFIIYQ

SEQ ID NO: 30851 - protein, 329 aa, Glycine max
  Clone ID: TF_GmC1320_1.pep
MKTGSMIFSLLHVPRFRIQSLANCWGETFHGFSTTCGNNSNVRLLGSRIYGLQGGQRKKWTRPITTNIEGKGSTKSKSIKHEILSETILANATVNVNKTQLDKSQEIQYCDIQQEIAENKDLSSYTVIVFDIETTGFSRENERIIEIALRDLQGGENSTFQTLVNPQCKVPNSHIHGITTHMVNQPGVPRMEDLIPILLQYVRSREKPGGDVIFVAHNARCFDVPFIINELRRYSVEIPPNWLFLDTLPLARELMKSGGTTLSSTSLAALRDLYGIKVDGSAHRAMVDVNALSLILSRLTSDLKLTLSDLVKKSFTESDIINSKNKKKN

SEQ ID NO: 30852 - protein, 96 aa, Glycine max
  Clone ID: TF_GmC1320_3.pep
MMDLKEWSSSSEELNVNRKCCADCKTTKTPLWRGGPAGPKTLCNACGIRYRKRRACWRKGELKKQKQKQKQRWKMLGEEEQAAVCLMALSCGFVFA

SEQ ID NO: 30853 - protein, 544 aa, Glycine max
  Clone ID: TF_GmC1115_1.pep
MGKQGPCYHCGVTSTPLWRNGPPEKPVLCNACGSRWRTKGTLANYTPLHARAENIDYEDQKVSRVKSISLNKNTEVKLVKRKQNYDNAASGGFVPDYSQGYQKVVDEDTSNRSSSGSAVSNSESCAQFGGPDASDLTGPAQSVVWDAMVPSKKRTCAGRPKPSSVEKLTRDLCTILHEQQSYFSASSEEDLLFESDTPMVSVEIGHGSILIRHPSSIARDEESEASSLSVDNKQCLMNEAYSFSSTIPMYSDRSGMNFSSHGVEKIKNSAGQIMQQEKLERDKSQLEKLQVHGNHDSPLCSIDLNDVVNYEEFMRNLTNEQQQQLLKYLPVVDTAKFPDSLRNMFNSFQFKENLIYFQQLLGEGVFNISLLGAKPEEWKTLERLALSNLSKSKWVEHYNFLKKCENKSGKSIGLGSTAMESSNVTTGKRMREHDSRNQNIPELKTTMRSPKRVIIKPPSCEVKEVVEEGSSFSPKSLFALPHGVGGLHMLDSFNFVGESSEDLLLEVPSNSSFPQAELLHPSLSYGARQVSTTSSSVHSPVTHP

SEQ ID NO: 30854 - protein, 239 aa, Glycine max
  Clone ID: TF_GmC5880_1.pep
HVTPNSLKPTFVFLLLFLLSFILLLMDMDVCRNISVSSSECQQELPTLDDLFCHQNTEVDFGMEWLSVFVEDCFSSRPSCLLPPSGGGVQTTSTSTKPSSGTIMQRPQQSHHCPLQNFAVPGKARSKRKRLSAPRTNKDPLSIWSHHLNPQNESLCSDPPLLKQAYWLADSELIMPKPKDEEQEEVVTKEDEKVINEVSKEIALGTLSLMRVAMVNNNQCQEGAHIAWLRGPHSGGQDH

SEQ ID NO: 30855 - protein, 303 aa, Glycine max
  Clone ID: TF_GmC332_1.pep
MEVAVAKALKPSLRREFIVQQMLCEDIFSLNANTVAAGEDFSVDDLFDFSNGSLHNEQQQEYDEGKQSLSASEDRGEDDCNSNSTGVSYDSLFSTELAVPAGDLEDLEWVSHFVDDSLPELSLLYPVRSEEANRFVEPEPSAKKTPCFPWEMKITTKARTVRNRKPSNSRMWSLGSPLLSLPSSPSSPSSCSSSVREPPAKKQKKQAQVQPVGAQIQRRCSHCQVQKTPQWRTGPLGAKTLCNACGVRYKSGRLFSEYRPACSPTFCSDIHSNSHRKVLEIRKRKEVAEPDTGLAQTQMVPTC

SEQ ID NO: 30856 - protein, 294 aa, Glycine max
  unsure (1)..(294): unsure at all Xaa locations
  Clone ID: TF_GmC332_2.pep
MEVAVAKALKPSLRSEFIVQKMHCEDIFSLNANTVAVGEDFSVDDLFDFSNGSLHNEHQQECDEEKQSLSASSQSQDRGEDDSNSNSTGVSYDSLFSTELAVPAGDLEDLEWVSHFVDDSLPELSLLYPVRSEEANRFVEPEPSVKKTPRFPWEMKITSKARSVRNRKPNTRVWSLGSTLLSLPSSPPTKKQKKRAEAQVQPVGVQIQRRCSHCQVQKTPQWRTGPLGAKTLCNACGVRYKSGRLFSEYRPACSPTFCSDIHSNSHRKVLEIXKRKEVAEPDTGLAQTQMVPTC

SEQ ID NO: 30857 - protein, 305 aa, Glycine max
  Clone ID: TF_GmC246_1.pep
MKDCWFFDNNFNGLSDESLDDVMDMELLDLPLDFEDVETDAVEEQDWDAQLKLLEDPPPPLGVFPLQQSSAFCGQTRNENAKLGSKSFSASLAKTVRPAYGKTIPVQKVSLKGKDLLQFQTNSPVSVFESSSSSPSVENSNFELPVIPTKRPRTKRRRLSNISLLYSIPFILTSPAFQKFQRMDFSKSDIQTQPSGELLCKFKKKQRKKDIPLPTNKIEMKRSSSQESVAPRKCLHCEVTKTPQWREGPMGPKTLCNACGVRYRSGRLFAEYRPASSPTFVASLHSNSHKKVLEIRNRATQVTVR

SEQ ID NO: 30858 - protein, 197 aa, Glycine max
  Clone ID: TF_GmC38139_1.pep
SHIQWKVFESSSSSSVENSTFDRPVIPVKRARSKRQRPSNFSPLFSIPLIVNLPAVRKDQRTAASDSAFGTNVAGNLSNKVKKQKKKDLSLLSDVEMTRSSSPESGSPRKCMHCEVTKTPQWREGPMGPKTLCNACGVRYRSGRLFPENRPAASPTFVASLHSNCHKKVVEMRSRVIQEPVRCSMLASSNLHGNSVG

SEQ ID NO: 30859 - protein, 333 aa, Glycine max
  Clone ID: TF_GmC5694_2.pep
MATVNPQPLQFEDPAIPVDDDDDDDDDDGGDDDAMDDLEDANVNSVNVAANAAASVNHEAVVAMPSRTSELTLSFEGEVYVFPAITPQKVQAVLLLLGGRDVQARVPAVEQPFDQSNRGMGDTPKRSNLSRRIASLVRFREKRKERCFDKKIRYSVRKEVAQRMHRKNGQFASLKESPGSSNWDSAQSSGQDGTSHSESVRRCHHCGVSENNTPAMRRGPAGPRTLCNACGLMWANKGTLRDLSKGGRNLSVEQSDLDTPIDVKPTSVLEGELPGIHDEQGSSEDPSKSNAADGSSNHAVNPSDEELPETAEHFTNVLPLGIGHSSTNENEQE

SEQ ID NO: 30860 - protein, 82 aa, Glycine max
  unsure (1)..(82): unsure at all Xaa locations
  Clone ID: TF_GmC166087_1.pep
MRPSISPTTDKAINSSPRFQNHQGLESRRYSQRSPRNNNGSSTPRVCSDCNTSTTPLWRTGPXGPKSLCNACGIRQRKARKA

SEQ ID NO: 30861 - protein, 257 aa, Glycine max
  Clone ID: TF_GmC1014_1.pep
VKVERERERGESKRRHSQRRHTRCSSSRQARTRHVALSLYLDLPSSTIHASALFSLQTPHSGPCSLATRSLPIDLLASTPNPHDLYPLLSPPGPAPHQRLPRITFTLSNHSSFLISYSTSPSSSALQWLLPPQSSHPFVYTQCQSIHARSVFPCQDTPALRIQYSALLNVPSQLSAVMAARHVERRSPKHDDAVHVVLPDGESWCAQGRIVEEFVMEQSVPPYLFAFAVGELGNREVGPRTRVYAEDGGAEWKGRRR

SEQ ID NO: 30862 - protein, 146 aa, Glycine max
  Clone ID: TF_GmC1014_2.pep
MAAVDPHSFTDSRQARTRHVALSLYLDLPSSTIHASALFSLQTPHSGPFYLDTRSLTIHSVIHPKTQTPIPFSLSDPDPIKGSLLSFTLSDHSSFLISYSTSPSSSALQWLLPPQSSHPFVYTQCQSIHARSVFPCQDTPALRIQY

SEQ ID NO: 30863 - protein, 96 aa, Glycine max
  unsure (1)..(96): unsure at all Xaa locations
  Clone ID: TF_GmC5231_1.pep
LDLTWYMHRLKSKDLSICHNMILLGSCIMKPNATXTEMMLXAVTWPNFTDVYPFAPIDQXKGYQEMFNNLSELLLDKFSLHSRLVVIRAHYLICQL

SEQ ID NO: 30864 - protein, 141 aa, Glycine max
  Clone ID: TF_GmC5231_2.pep
MSLLTRLDDESNLAAEKSQTKILKTKNIAARSLSKCKIDFLNSTQSGRDAKIWEKRCGHKDARIWERRCSHCDAIKTPQWRTGPFGRNTLCNACGIRFKAGKLYPEYRPFLQDHHLSIGQELQLETPLNGTNEDIYNWQIK

SEQ ID NO: 30865 - protein, 163 aa, Glycine max
  Clone ID: TF_GmC588513_1.pep
MMHHCCGSSQGHVMGTCTCGMYHSETSAYGSMLFSVPNNSEYDMYSSFTPSPSSVDCTLSLGTPSTRLTQDDDHDNDNKRHPHQRRSGVANFCWDLLHSKHNNNNTQSQSKSSSRGSSSNNNNNNDPLLARRCANCDTTSTPLWRNGPRGPKSLCNACGIRFK

SEQ ID NO: 30866 - protein, 239 aa, Glycine max
  unsure (1)..(239): unsure at all Xaa locations
  Clone ID: TF_GmC225547_1.pep
METIGSVDDLLDFSSDIGEEDDYDDKPRKACPSLNSKCAGPSLFNPLVQEFAEEELEWLSNKDAFPSVETFVDLSSIQPGTTKNQKSAPVLECSTGSSNSNNSTNSISLLNSCDHLKVPVRARSKSRSRHRPGLAENSSQQVWWRQPSNGTSKADEGMKISSIGRKCQHCGAEKTPQWRAGPSGPKTXCNACXVRFKSGRLVPEYRXCSSPTFHSDLHSNSXRRSRDEEAEQMGMDKCK

SEQ ID NO: 30867 - protein, 284 aa, Glycine max
  Clone ID: TF_GmC5880_2.pep
MNMDMCQNVSVSGECQQVQVFAPSCSSSLDDLFSAQNTEVDVELEWLSEFVEDCFSSPPSCVLVPIGVKTTSTSTNLSSGTLKRPQQQNESPLQNFAVPGKARSKRKRKRLSAPRTTKHTLSTWSQHFSTQNDGVSSDPPLLKQAYWLADSELIVPKKKDVEQEEEEGVVVVVKKEKLGDYCDDDEGDEINNNNSNNDDNVQHPIPRRCTHCLAQRTPQWRAGPLGPKTLCNACGVRYKSGRLLPEYRPAKSPTFVSYLHSNSHKKVMEMRMGVGVAVLSTDKK

SEQ ID NO: 30868 - protein, 92 aa, Glycine max
  Clone ID: TF_jC-gmXLIB3563P070ae11d1.pep
NNSNNDDNVQHPIPRRCTHCLAQRTPQWRAGPLGPKTLCNACGVRFKSGRLLPEYRPAKSPTFVSYLHSNSHKKVMEMRMGVVGVFSTDNNK

SEQ ID NO: 30869 - protein, 105 aa, Glycine max
  unsure (1)..(105): unsure at all Xaa locations
  Clone ID: TF_GmC103141_1.pep
MAKKINSRGKKRTASDGGAARRCSHCGVQKTPQWRXGPLGAKTLCNACGVRYKSGRLLPEYRPACSPTFSSELHSNHHRKVLEMRRKKEDVPEPDTASPPSLPGF

SEQ ID NO: 30870 - protein, 70 aa, Glycine max
  Clone ID: TF_700678225H1.pep
MALVGEQKHSLMVKKGPCSHCGVTHTPLWHDGPTEKPVLCSDCGSQYKLKGNLDNYFPKNPVVQSFHNKF

SEQ ID NO: 30871 - protein, 326 aa, Glycine max
  Clone ID: TF_GmC767_1.pep
MRELKRLFRLTKGSSTAVSVSSLPSPLSFFSQQEQRKMEVAAAKALKPSLRTEFIFPQAIYDEILCFNANNVVAGEDFSVDDLLDFSNGEFQVGKDFDDYEEDEDEEKGSTSGSLQSQDRTEDDSNSNSTAGGGGDSVFAGELSVPADDVADLEWVSHFVDDSLPELSLLYPVRCSEQTRVCTEPEPRPGSVQTIPAVPRKPRTGKTRKPNARVWSSMSSLCSSVTAKKQKKKVEAQNGGAQSLRRCSHCQVQKTPQWRTGPLGPKTLCNACGVRFKSGRLFPEYRPACSPTFSDDIHSNSHRKVLEMRRKKEIVESDRIQLIPSC

SEQ ID NO: 30872 - protein, 122 aa, Glycine max
  Clone ID: TF_LIB4390-045-R1-K2-C5.pep
MPKPKDEEQEEVVTKEDEKVINVMSKESFGDSELEEGSNGQQPMPTRRCSHCLAQRTPQWRVGPLGPKTLCNACGVRYKSGRLLPEYRPAKSPTFVSYLHSNSHKKVMEMRMAVFSTISSEQ

SEQ ID NO: 30873 - protein, 99 aa, Glycine max
  Clone ID: TF_GmC241333_1.pep
MNQSVRPRTLAPRRCSHCGVQKTPQWRTGPLGPKTLCNACGVRFKSGRLLPEYRPACSPTFSSELHSNHHRKVLEMRQKKETVSVDETGFAPAHVVPSF

SEQ ID NO: 30874 - protein, 305 aa, Glycine max
  Clone ID: TF_GmC161373_1.pep
MEAQEFFQNTFCPQFPSDSNITPSNANPSAATTDHFLVEDFFDFSNDDDATFDSLPTDVDSPTVTPVDTTTNSNFPASADAHFPGDLSVPYDDLAELEWLSKFADESFSSEDLQKLQLITGVRAQNDAASSETRDPNPVMFNPQVSVRGKARSKRTRGPPCNWTSRLVVLSPNTKSSSSSHSGAEGGSEGRKCLHCATDKTPQWRTGPMGPKTLCNACGVRYKSGRLVPEYRPAASPTFVLTKHSNSHRKVLELRRQKEMVKVQHQQHQFLQLQHQQNMMFDVPSSNGEDFLIHQHVGPNFTHLI

SEQ ID NO: 30875 - protein, 237 aa, Glycine max
  Clone ID: TF_GmC5042_1.pep
MDLYGSFSTPSDCLHIDDFLDFSNITTDTHHHLPPPQNSPLISHDDANLFFNFPSVPTDEAAELEWLSQFVDDDATSFHSFPATASIGSHSTSFLSNNNNRNDNNEYPKSSLSSNIPCSSAVAGKSRARREGSVTGDGGVRRCSHCASEKTPQWRAGPLGPKTLCNACGVRFKSGRLVPEYRPAASPTFVLTQHSNSHRKVMELRRQKELLRHQQQQQLQQEQCHRHTHNHHDFKVC

SEQ ID NO: 30876 - protein, 101 aa, Glycine max
  unsure (1)..(101): unsure at all Xaa locations
  Clone ID: TF_LIB4392-031-R1-N1-G6.pep
MAGSSSPGSGPPPKCLPCGVPKTPPWREGPLGPQTLCNACGVXYRSGPLFFXFRPAASPPFVASLPPNCPKKVVGIRNKVFPGPVWGFLLASPPPPGNFVG

SEQ ID NO: 30877 - protein, 297 aa, Glycine max
  unsure (1)..(297): unsure at all Xaa locations
  Clone ID: TF_GmC1783_1.pep
RTRPIRLAPHTLYRSHTIHTPAANSDPHINSSSHTIEEHGAVSNHHIHYSSHTIEVDGGATVEEVSAVPPLEISINDSSQLTLSFRGQVYVFDAVTPDKVQAVLLLLGGNELTSGSQCAELSSQNQTGEEEYPAKCSLPQRAASLNRFRQIRXRRVAHKKVRYSVRQEVALRMHRNKGQFTSSKNQDGTNSWGSDQESGQDAVQSETLCTHCGISSKSTPMMRRGPSGPRSLCNACGLFWANRGTLRDLSKRNQEHSLAPPEQVDEGSNNNDFDCRSGIPAQHNNLVNDNKALVSDR

SEQ ID NO: 30878 - protein, 300 aa, Glycine max
  Clone ID: TF_GmC41398_1.pep
MDGIHGGDSRIHITDGQHPIHVPYVQEHEHHGLHHISNGNGIDDDHNDGGDTNCGGSESMEGEVPSNHGNLPDNHAVMMDQGGDSGDQLTLSFQGQVYVFDSVSPEKVQAVLLLLGGREIPPTMPAMPVSPNHNNRGYTGTPQKFSVPQRLASLIRFREKRKERNYDKKIRYTVRKEVALRMQRNKGQFTSSKSNNDESASNATNWGMDENWTADNSGSQQQDIVCRHCGISEKSTPMMRRGPEGPRTLCNACGLMWANKGILRDLSRAAPLSGTIKNENKSLEANQIVHRVAGEADDSS

SEQ ID NO: 30879 - protein, 185 aa, Glycine max
  Clone ID: TF_GmC1271_1.pep
MISNSKQIKNEEKNPPLTPLGTDDSNNYNSSANHSNITVRVCSDCHTTKTPLWRSGPKGPKTLCNACGIRQRKARRAIAVAATANGMNPVEAEKSQVKKGNKLHSKGMKSKTKGAPHMKKKRKLGAKYRKRFGAFEDLTVRLSKNLALQKVFPPDEKEAAILLMALSYGLLHGFPTDRYVNYLDL

SEQ ID NO: 30880 - protein, 321 aa, Glycine max
  Clone ID: TF_GmC356_2.pep
MQVDGFQPFHYANCSDEGEEAVPVTNASSAMHARASELTISFEGEVYVFPAVTPEKVQAVLLLLGAQEMTNSAPTSDILLQQNYQEKAEAAVRKLEMKLEKRRASSMDKIMNKLRLLGLNRMHRKNGQFASLKEDYKSPAENWDSSNGTPCPDSTERRCQHCGISEKSTPAMRRGPAGPRSLCNACGLMWANKGTLRDLSKAARIAFEQNELDTSADIKPSTTEAEHSFAKQDKEGSPEETKPVQMDSSRSPEKTNDQFIIGTAESVTDNLSIQVENHALSLHEQDTLEDLADASGTEFEIPAGFDDQVDIDDSNMRTYWL

SEQ ID NO: 30881 - protein, 128 aa, Glycine max
  Clone ID: TF_GM378C18.C60.o1.fg.pep
MWYVSQPNHQLLRHVFLHAQPQTTTLHDSDNIYDYSSFTPSSFSSVDCNLSLGTPSTCVSEDEEKRSRHECHSVSNFCWDLLQSKHNNPQSHSKSSGTTNTTDPLLARRCANCDTTSTPLWRNAPVAL

SEQ ID NO: 30882 - protein, 310 aa, Glycine max
  Clone ID: TF_GmC4231_1.pep
MEPSAMYGPSQPLNIPSRIGAGERDDGSGNEPAVDGHHHHIQYETHALDDGAAGGAVVVEDVTSDAVYVSGGGGPEESSQLTLSFRGQVYVFDAVTPDKVQAVLLLLGGCELSSGGSPCVDPGAQQNQRGSMEFPKCSLPQRAASLDRFRQKRKERCFDKKVRYSVRQEVALRMHRNKGQFTSSKKQDGANSYGTDQDSGQDDSQSETSCKHCGTSSKSTPMMRRGPSGPRSLCNACGLFWANRGALRDLSKRNQEHSLPPVEQVDGGNDPDCRTAAADPAQNNLAAFSEPVNPALVADRKVFQSQKMLE

SEQ ID NO: 30883 - protein, 310 aa, Glycine max
  Clone ID: TF_GmC4231_2.pep
MEPSAMYGPSQPLNIPSRIGAGERDDGSGNEPAVDGHHHHIQYETHALDDGAAGGAVVVEDVTSDAVYVSGGGGPEESSQLTLSFRGQVYVFDAVTPDKVQAVLLLLGGCELSSGGSPCVDPGAQQNQRGSMEFPKCSLPQRAASLHRFRQKRKERCFDKKVRYSVRQEVALRMHRNKGQFTSSKKQDGANSYGTDQDSGQDDSQSETSCTHCGISSKSTPMMRRGPSGPRSLCNACGLFWANRGALRDLSKRNQEHSLPPVEQVDEGNDSDCRTATADPAHNNLPAFSEHDNPALVADHKVFQSQKMLK

SEQ ID NO: 30884 - protein, 157 aa, Glycine max
  Clone ID: TF_GmC6848_1.pep
PQLPSLLHAPDPAAPPPHPVHGALSGIKAPKQASGEHKKKKKIKVTFPSGQERNAPSQAIRKCLHCEITKTPQWRAGPMGPKTLCNACGVRYKSGRLFPEYRPAASPTFCAAMHSNSHKKVLEMRNKTGTKSGFATVSAASPELIPNTNSSLTLEYM

SEQ ID NO: 30885 - protein, 299 aa, Glycine max
  Clone ID: TF_GmC1294_1.pep
MEVAAAKALKPSLRTEFIFPQAIYDEILCFNANNVVADEDFSMDDLLDFSNGEFQVGKDFDDYEEEEDEEKNSTSGSLQSQDRAEDDNNSNSTAGGGGHDYVFAGELFLPADDVADLEWVSHFVDDSLPELSILYPIHCSKKTRVWAEPESRLSPAQTVSKVPRKSRTEKPRKPNTRVWSSFTVFAGSVGFGELVTKKQKKKVEAQSGGAQSLRRCSHCQVQKTPQWRIGPLGPKTLCNACGVRFKSGRLFPEYRPACSPTFCGHIHSNNHRRVLEMRWKKQIAESVTGSDRKQLIPNY

SEQ ID NO: 30886 - protein, 324 aa, Glycine max
  unsure (1)..(324): unsure at all Xaa locations
  Clone ID: TF_GmC28720_1.pep
MVGPNFMDEIDCGSFFDHIDDLLDFPVEDVDGGAATLPSVSAGNSNSLASIWPSESDSFPTSDSVFSGNSASDLSAELSVPYEDIVQLEWLSNFVEDSFCGGSLTMNKVEEPSCTTKEDSVNTQFHTSSPVSVLESSSSCSGGKTFPLSSPEIYILWTYSSAQPXSYYVIPCISSKSSSDSENFAESQLVPKMPKQASEEPKKKKKVKLPLPLVPADNNQNASQPVRKCMHCEITKTPQWRAGPMGPKTLCNACGVRYKSGRLFPEYRPAASPTFCPSVHSNSHKKVLDTMQCMWGSLQVRPALPRIPACCKSNFLPIRALQFS

SEQ ID NO: 30887 - protein, 145 aa, Glycine max
  Clone ID: TF_GmC154925_1.pep
TRLLHLVAPEKEKPPQAKKREGTNVECSGRKCLHCGAEKTPQWRTGPMGPKTLCNACGVRFKSGRLVPEYRPAASPTFMSTKHSNSHRKVLELRRQKEMQRQQHHQQLMSQSSIFGVSNGGDEFSIHHHHHNHHLHCGPDFRHVI

SEQ ID NO: 30888 - protein, 124 aa, Glycine max
  unsure (1)..(124): unsure at all Xaa locations
  Clone ID: TF_LIB3242-152-Q1-J1-A8.pep
LISPASSTGENVQHNATTTSKAASSDSENFAESVIKGPKQASGEHKNKRKIKVTFSSGQEQQNAPSQAVRKCLHCEITKTPQWRAGPMGPKTLCNACGVRYKSGRLFPESRPAASPTXCAAVHS

SEQ ID NO: 30889 - protein, 124 aa, Glycine max
  Clone ID: TF_GmC7389_1.pep
EEAPLSWAPPAAPPQEPSFWHQLVHNALIPGTACFPQLLTPTRFGSPPVPGIPPHAMYKADHDIGLPGPLFDFYPSKECIDAAIGDVLSKPWLPLPIGLKAPALDSVMSELQRQGIPNIPPSSA

SEQ ID NO: 30890 - protein, 75 aa, Glycine max
  Clone ID: TF_GmC46996_2.pep
TAARRRQKGVCGCKTSLVGPDTETLSVTSHSQTMPYPWLSLTPNSSTRVRIAARGRGSDGNPHLCGCMRFQFQFQ

SEQ ID NO: 30891 - protein, 116 aa, Glycine max
  Clone ID: TF_9902941.pep
YCFFLGVGATPKLVLQLMNIKSLSIAHVKSHLQMFRSKKVDDRNQVFADHNSLVETGDKNIYNLSQLSMLQGYNPSQSSSFSYTNNYPSYGFGDASFGVYEKLLQRPFDWSNAISS

SEQ ID NO: 30892 - protein, 171 aa, Glycine max
  Clone ID: TF_GmC12582_2.pep
MCIRLLGATPKSVLELMDVKDLTLAHVKSHLQMYRTVKTTDKPAASSGLSDGSGEDDMSPMGSSGGMRQFSDQRSLSDRPVQQDMDYSSGNNTLWSNSSSSRETWQQNNSNDVDGFRPPIFQSQQISGGHQIQECDSTQLKNSLSGSNLECKNPSLEFTLGRPDWNGKGQA

SEQ ID NO: 30893 - protein, 54 aa, Glycine max
  Clone ID: TF_uC-gmroLIB3259P231e09b1.pep
ELMQGDGLTNDQGKSHTQKYRVHTRTDAAACSNHTVVSSWRLVDVIRSMTQTTI

SEQ ID NO: 30894 - protein, 90 aa, Glycine max
  Clone ID: TF_GmC391586_1.pep
MGESSGSQCSKTSPSNIDEDDEGESEANEDQSKQNNNGGSSSNSTVEENEKKIRPYVRSKMPRLRWTPDLHLRFIHAVQRLGGQERATPK

SEQ ID NO: 30895 - protein, 35 aa, Glycine max
  unsure (1)..(35): unsure at all Xaa locations
  Clone ID: TF_LIB3139-043-P1-N1-G4.pep
KTTPNVVLKLIKVXRLTIYHVKSHLQKYMTARYIL

SEQ ID NO: 30896 - protein, 51 aa, Glycine max
  Clone ID: TF_LIB4164-049-R1-K1-H3.pep
VCLLTLAGATPKSVLELMNVKDLTLAHVKSHLQMYRTVKSTDKGITAAGRL

SEQ ID NO: 30897 - protein, 68 aa, Glycine max
  unsure (1)..(68): unsure at all Xaa locations
  Clone ID: TF_GmC38886_2.pep
MVPHKSQGGVEQLANAGVLGGSAVKIAAAPAGGSGKQRLRWTSDLHDRFVDAITQLGGPDXWGISFQY

SEQ ID NO: 30898 - protein, 41 aa, Glycine max
  Clone ID: TF_LIB3092-044-Q1-K1-A2.pep
GIHSSTPKHFRELMHVGGLGNDELKSHVQKYLLYTQRVPVA

SEQ ID NO: 30899 - protein, 103 aa, Glycine max
  Clone ID: TF_LIB4391-037-R1-K1-G3.pep
MYSTHQQHQGKNIHSSSSSSRMPIPSERHMFLQTGNGSGDSGLVLSTDAKPRLKWTPDLHARFIEAVQQLGGADKATPKTVMKLMGIPGLTLYHLEEPSPGKN

SEQ ID NO: 30900 - protein, 88 aa, Glycine max
  Clone ID: TF_jC-gmro02910037d06a1.pep
AAPNAIMPTMNVMGLTMVDLTSHLAKYRLGKQSWKDAVEGCKDGMMANPMCGSNMFSSLTPEYTLRPMRSAVAFTTPLTTERGVHLEL

SEQ ID NO: 30901 - protein, 115 aa, Glycine max
  Clone ID: TF_GmC59217_2.pep
MYHHHQHQGKNIHSSSRMPIPSERHMFLQTGNGSGDSGLVLSTDAKPRLKWTPDLHARFIEAVNQLGGADKATPKTVMKLMGIPGLTLYHLKSHLQKYRLSKNLHGQNNNVTYKN

SEQ ID NO: 30902 - protein, 140 aa, Glycine max
  Clone ID: TF_GmC200_2.pep
NPRKQRRCWSPDLHRRFVDALQQLGGPQVATPKQIRELMQVVGLTNDEVKSHLQKYRLHFKRPQGSSIGHANSGLCKMAQDKCGDDKSGSPQGPLFLGGSGKGLSSSGRNSMDTEGDEESDCRNWKGGIHHQLQPESDVL

SEQ ID NO: 30903 - protein, 202 aa, Glycine max
  Clone ID: TF_LIB4392-010-Q1-K1-A2.pep
QIIKHDDKECLDPSSTKKARVVWSVDLHQKFVKAVNQIGFDKVGPKKILDLMNVPWLTRENVASHLQKYRLYLSRIQKENDQRSSSSGLKHSDFPLKDMRSFGFQNSVNNQQQNDVAIDSYNHSDGSLLLQNVETKSHEADPKGIVSQSTIAKKGRILTGNIADTNMRESLRVGLNQTFAPLESEENHAVFDCSMPTPYTWT

SEQ ID NO: 30904 - protein, 61 aa, Glycine max
  Clone ID: TF_jC-gmst02400044h05a1.pep
MYSRLIHPHDGIVTQDDLQGAASNLSHAHKGDPCLVLTADPKPRLRWTQDLHERFVDAVTQ

SEQ ID NO: 30905 - protein, 161 aa, Glycine max
  Clone ID: TF_GmC13720_2.pep
LVWTPQLHKRFVDVVAHLGIKNAVPKTIMQLMNVEGLTRENVASHLQKYRLYLKRMQGLSNEGPSSSDQLFASTAVPQSLHDSAPPSAHSNGHGHLPVPMMSMPYPPPMMSMPYPPPMMSGMPHAHGHMGIPMPNSSATSAYHPYNMLHQRDWPHLAPNDK

SEQ ID NO: 30906 - protein, 471 aa, Glycine max
  Clone ID: TF_GmC345_1.pep
DNEDPSTQKKPRVVWSVELHRKFVSAVNLLGIDKAVPKKILDLMNDEKLTRENVASHLQKYRLYLKRISCGANRQANMVAALGTADSSYLRMGSLSGVGHLQTLTGPQQFHNNAFRPFPPGGMIGRLNTSVGLNNHGLSSSEALQLSHAQNLNNSINDPLKFQSSIACGNQNAIQGMPMSIGLDQLQHNKGVSVSVGPIQNMSPLIDARPTFAVSNRLSDQIPKVTMGCSPSPVLDVSNNALVLKADSENTQGRGVYENLTSVASQHSQFSLPLLGHGRCSDIWSSPMRSSGTNSYPPSETLQGGNLSGASSITSLSNQSHDSQTDMHSQGLIFTNNSGQISNNVPFLGWDDHNHDSSYHSNVIGNSIDSLIDPEGHTSINSTYNRNLDFNFCDPLQMKHDGIMGLSDENSLKQQHRYIMNQQKSQNSRAPNNIGSLEDFVSSMMKQKQDKVKFLDGSYLCNNNYPDGTSM

SEQ ID NO: 30907 - protein, 54 aa, Glycine max
  Clone ID: TF_LIB3109-005-Q1-K1-H1.pep
MERMFPPKKPSTMNSHDRPMCVQGDSGLVLTTDPKPRLRWTVELHERFVDACTQ

SEQ ID NO: 30908 - protein, 318 aa, Glycine max
  unsure (1)..(318): unsure at all Xaa locations
  Clone ID: TF_GmC12007_1.pep
QDDTDTHSSHLTSSGAVGHMFSSSPGYSTDLHHSSFSSHEKQPRNTHFISQSLSNMASLPLSYSSNSEPIPSTTSTPYSNGNSVSWHTDSLPSFLDFPANTSIGNSQVESSDCNIMATEEYSKRNDWQEWADQLISDVDPLTSNWNDLLADNIQDLEPKVAKSSSQLPIGHQSQSHQQLPASSGENRVGVAPTSSTNSAPAKPRMRWTPELHEAFVEAVNQLGGSERATPKGVLKLMKVDGLTIYHVKSHLQKYRTARYRPESSEGAMEKKPSPIEEMSSLDLKXGIEITEALRLQMEVQKRLHEQLESQSGVSSTHA

SEQ ID NO: 30909 - protein, 213 aa, Glycine max
  Clone ID: TF_GmC60412_1.pep
MKNSERSSVRKYNKSELPRLRWTPELHQHFVEAIQSLGGSHKATPKRILQQMRVKGLRIAHIKSHLQMYRNMKGHAIVAPVDQLLEGKAKDFKICSNICPTERNLKRELHLLDYKDGLSQTSEETDYDLNQEPQSSAVLLLSDDVSNEEENFADLSLISFSMPLISMMQSENNKEIMRFLSSTAAAAANHSVVDSSFFTPSFANNYINLDLTI

SEQ ID NO: 30910 - protein, 275 aa, Glycine max
  Clone ID: TF_GmC247294_1.pep
MREEDSNWFSRWEEEFPSPEELMPLSQTLITPDLAMAFDIRNPHTTNTAQQQHHHHQQQPQQQQQPSNPSSLPNPLQQQQQQQQPTSAEFADSGELGSGTAGEEPARTLKRPRLVWTPQLHKRFVDAVAHLGIKNAVPKTIMQLMSVDGLTRENVASHLQKYRLYLKRMQGISAAGPGGPGGGASGAVADPATDHLFASSPVPAHFLHPAARPNSDHFLPFVPALHPHQQQQQMAAAAQYHRQVRHFGSPPNGHFENPFMSRPHLQRLGGGGGGG

SEQ ID NO: 30911 - protein, 194 aa, Glycine max
  Clone ID: TF_GmC27103_2.pep
MNRLSLLTPSSVKEGCGSRGSRSSSNRAVSSSSPPMVQPSLRATSLQQTARKQRRCWSPELHRRFVNALQKLGGSQVATPKQIRELMQVDGLTNDEVKSHLQKYRLHTRRVPAASSNQPVVVLGGLWMSQDQYNDSSKVSSSGSGSPQSPLHLAAGSRGGTSPTEGDSMEDDEDARSESFSWKSHMHKAGKVDV

SEQ ID NO: 30912 - protein, 373 aa, Glycine max
  Clone ID: TF_GmC1389_1.pep
MERMFPPKKPSTMNSHDRPMCVQGDSGLVLTTDPKPRLRWTVELHERFVDAVTQLGGPDKATPKTIMRVMGVKGLTLYHLKSHLQKFRLGKQPHKDFNDHSIKDGMRASALELQRNTGSSSAMIGRNMNEMQIEVQRRLHEQLEVQKHLQLRIEAQGKYMQSILEKAYHTLAGENMASAATNLKSAIVPHHQGIPDMGVVMKEFGSPLGFSSFQDLENIYGGNQIDLQQNMEKPSLDHGFMPINESLCLGKKRSNNPYSGSGKNPLIWSDDLRLQDLGGPASSCLGPQDDPFKGDQIQIAPPGSLDRGASTDIDPMSEIYDSKPVLQSEEKKFDASSMKLERPSPRRAPLQPERMSPMISTGTMAQGRGSPFG

SEQ ID NO: 30913 - protein, 319 aa, Glycine max
  Clone ID: TF_GmC6799_2.pep
MGLVVPEEELSLDLRPSFVPKTITDFLCHLSTTPNASHKVSLLDDFVHRLELELAKIQAFKRELPLCMFLLNDAISALKVESEKCRACKSEPVFEEFIPLKKECDQRKEIEKEKECRDKKNWMSSFQLWNNDDKADNNNNAYECDKKHNYRVENKNNGEKRKSVLEPLFQYGRIRNGEKGFVIPFSSYPATKEEKEDCVANGLSLQTPGTAVKSTREGSGCRTSSCRVGSSAPSPLHQPQSSRKQRRCWSPELHSRFIKALEVLGGSQATPKQIRELMRVDGLTNDEKYRLHTQRVPVATSCKFSRSAVDLEACGCTMN

SEQ ID NO: 30914 - protein, 238 aa, Glycine max
  Clone ID: TF_GmC38886_1.pep
MYHTKKFSPASMVPHKSQGGAEQLANAGVLGGSAVKTAAPSGGSGKQRLRWTSDLHDRFVDAITQLGGPDRATPKGVLRVMGVPGLTIYHVKSHLQKYRLAKYLPESPADDPKDEKRMSGDSISGADSSSGMPINDALRMQMEVQKRLHEQLEVQKQLQMRIEAQGKYLQKIIEEQQKLGSTLTTSETLPLSHDKQNHPQSEASGSSDALASTVSPLKKQRIDDGSKEGFTASQVRKE

SEQ ID NO: 30915 - protein, 98 aa, Glycine max
  Clone ID: TF_GmC161288_1.pep
KNAVPKTIMQLMSVDGLTRENVASHLQKYRLYLKRMQGLSAGGGVGRVASAELTNERLFPSRPWRRLTAAAGSDHYCQFVHSGSHITKRGNSTTFGRA

SEQ ID NO: 30916 - protein, 376 aa, Glycine max
  Clone ID: TF_GmC594_1.pep
MAVENQREDGGCDRFPVGMRVLAVDDDPICLKVLENLLRKCQYHVTTTNQAVEALTMLRENRNKFDLVISDVNMPDIDGFKLLELVGLEMDLPVIMLSAHGDTKLVMKGVTHGACDYLLKPVRIEELKNIWQHVVRRKNFDSRDQNKASNEEKAPNFAGGGSQGLRSENSADQNKRLGKKRKDQSDEEEEGGEENEDDEDPSAQKKARVVWSVELHRKFVAAVNQLGLDKAVPKKILDLMNVEGLTRENVASHLQKYRLYLKKAAQQANMVAALGGSDSYLRMGSIDGYGDFCTSSGSGRITNTTLPSYASTGIFSRLNSPAALNMRAISSSALIRPVQSQNINCSLNTLGNIQPSIFPANHQVPGITWNSNINLA

SEQ ID NO: 30917 - protein, 313 aa, Glycine max
  Clone ID: TF_GmC381_3.pep
MYSRLIHPHDGIVTQDDLQGAASNLSHAHKGDPCLVLTADPKPRLRWTQDLHERFVDAVTQLGGASKATPKAIMRTMNVKGLTLFHLKSHLQKYRLGKQSGKDVGEGCKDGSYLLESPGADNSSPKLPTSDTNEGYEIKEALRAQMEVQSKLHLQVEAEKHLQIRQDAERRYMAMLERACKMLADQFIGATVIDTDSQKFQGIGSKAPRGTLVDPLGFYSMPSTEVAGVNVPEEEIPLSLPPQRADCSTESCLTSHESSGGLALEGSPGEGKRRMLGMDSMAAPLIWSEAKMRTQAINVAQGNLPQGITRYGM

SEQ ID NO: 30918 - protein, 222 aa, Glycine max
  Clone ID: TF_GmC381_5.pep
MYSRLIHPHDGIVTQDDLQGAASNLSHAHKGDPCLVLTADPKPRLRWTQDLHERFVDAVTQLGGASKATPKAIMRTMNVKGLTLFHLKSHLQKYRLGKQSGKDVGEGCKDGSYLLESPGADNSSPKLPTSDTNEGYEIKEALRAQMEVQSKLHLQVEAEKHLQIRQDAERRYMAMLERACKMLADQFIGATVIDTDSQKFQGIGSKAPRGTLVDPSWVLLHA

SEQ ID NO: 30919 - protein, 192 aa, Glycine max
  Clone ID: TF_LIB4164-003-Q1-K1-D8.pep
MDPRLIHPHDGIVTQDELQGGAASNLSHAHKGDPCLVLTADPKPRLRWTQDLHERFVDAVTQLGGASKATPKAIMRTMNVKGLTLFHLKSHLQKYRLGKQSGKDVGEGCKDGSYLLESPGADNTSPKLPTPDTNEGYEIKEALRAQMEVQSKLHLQVEAEKHLQIRQDAERRYMAMLERAWQMLADQFISAT

SEQ ID NO: 30920 - protein, 91 aa, Glycine max
  Clone ID: TF_GmC804873_1.pep
MPSSPTTTSSLHYNGDGDVNDKEDNDDTDCKDSRSDSRTETSAKRTTVKRLQLVWTLQLHKTFVDLVAHLPIKGAVPKTIMQLMNVEGLSL

SEQ ID NO: 30921 - protein, 519 aa, Glycine max
  unsure (1)..(519): unsure at all Xaa locations
  Clone ID: TF_GmC942_2.pep
MVCTANDLQGWKDFPKGLRVLLLEGDSSSAAEIREQLEAMDYKVSTFYDENEALSALSSSPKGFHVAIVEVSTSCSLGGFKFLENAKDLPTIMTSKDQCLNTMMKCIALGAVEFLSKPLSEDKLKNIWQHVVHKAFNSGENVLSESLKPVKESVESMLQLQTDIGQDKSRISIDLENVSRFSDNDHEQSAVCDKYPAPSTPQLKQGTRLLDDGDCHEQTNCSTEKESGEHDRECKSVETSCGNLNAESSPQPREPDKTLIREEDDFANVSKGESAVSLNPHNKKFLSNADGNTSPNKTGVLNDSCEIKANRKKVKVDWTPELHKKFVKAVEQLGIDQAIPSRILEIMKVEGLTRHNVASHLQKYRIHKXQRIRLEEDRKWHNQGDAMQRNYYMQRPIMAYPPYHSHHTLSPAPIYPMWGQPGSQTAGVQIWGHPGYPMWHPTESWHWKPYPGVHVDAWGCPLVPPPQAPCFPYNQNTPGLHNPKAVDYRFSMPRSSFEHHPVRQYFPFSSFYHVMNFFL

SEQ ID NO: 30922 - protein, 209 aa, Glycine max
  Clone ID: TF_GmC1335_2.pep
MYHSKNVPSASLIGGNSLSHGQHIDCGGSTMDPGSGGNGLSNNSNLTSKQRLRWTHELHERFVDAVAQLGGPDRATPKGVLRVMGVQGLTIYHVKSHLQKYRLAKYLPDSSSDEGKKADKKETGDMLSNLDGSSGMQITEALKLQMEVQKRLHEQLEVQRQLQLRIEAQGKYLKKIIEDNSGLSGVLSEAPGFGVCSGCSQGMHAKNLI

SEQ ID NO: 30923 - protein, 278 aa, Glycine max
  Clone ID: TF_GmC242282_1.pep
MAPCAAAAEFPVGLRVLVVDDDATTLKIIEQMSIRCRYRVTTCTEATVALNLLRERKGCFDVVLSDVHMPDMDGYKLLEHVGLEMDLPVIMMSGDSTTSAVMKGIRHGACDYLIKPVREEELRNIWQHVVRKFWNDSKEQDNSGSMEDSDQNKRGNDDAEYTSVADAAVVKAPKKRSSLKEEDIELESDDPAASKKPRVVWSVELHQQFVSAVNQLGLDKAVPKRILELMNVPGLTRENVASHLQKFRLYLKRLTGVAQHQNGMLYTVPGPIRIQSGN

SEQ ID NO: 30924 - protein, 334 aa, Glycine max
  Clone ID: TF_GmC16929_1.pep
MDLQNVQNQSMMRLVLSTDAKPRLKWTPELHQRFTEAINQLGGAEKATPKSLMRVMGIPGLTLYHLKSHLQKYRLGKSQPLETCSDNKQQGYSEIQNSDGHCSKEISIGTQNQMTESLKIAEALQMQMEVQRKLYEQIEVQKHLQLRIEAQGKYLQSVLTKAHEALARHSSSTTGVELAKFELSLLVSIINNACPSSPISELTETRGLSLNCGERKQDRGTMCSLESSLTSSESSEQQHIMDEAENPQKFDGVSVELPLISIHPAEVKAFKGDTSVDGRKRSAETDSDHCVDQACGKKKLRKSEVSQMLDLNSQYQRDIDSSVKEIDLNFSSSF

SEQ ID NO: 30925 - protein, 191 aa, Glycine max
  Clone ID: TF_GmC795_2.pep
RNTIRSRRAPRMRWTSTLHARFVHAVELLGGHERATPKSVLELMDVKDLTLTYVKSYLQMYRTVKTTYRAAASSGQSDVYDNGSSGDTSDDLMFDIKSSRRSDLSVKQGRSSVNQDKEYHGLWGNSSREAWLHGKTKTDSVGNVPFSLEKEMDPKCLSYERISDGSSSSNLSGSSPKKPNLDLEFSLGQPL

SEQ ID NO: 30926 - protein, 678 aa, Glycine max
  unsure (1)..(678): unsure at all Xaa locations
  Clone ID: TF_GmC683_1.pep
MNLSNGKGSMSTLTASVVMKSGDAVSDQFPAGLRVLVVDDDPTCLMILEKMLRTCLYEVTKCNRAETALSLLRENKNGFDIVISDVHMPDMDGFKLLEHIGLEMDLPVIMMSADDGKSVVMKGVTHGACDYLIKPVRIEALKNIWQHVVRKRKNEWKDAEQSGSAEEGDRQPKASDEADYSSSANEGSWRNSKKRRDEEEEGXDDSSTLKKPRVVWSVELHQQFVAVVDQLGIDKAVPKKILELMNVPGLTRENVASHLQKYRLYLRRLSGVSQQQGNLSNSFMSSQEATFGGTSINGIDLQTLSAAGQFPSQSLAKFQAAGLGRTTAKAGIPMSLSDQKNLFSFENPRLRFGEGSLTHMDIRKPKNLLHGILTNMEPKQLANLHQSTQPLGSLNMRVNSPATQNKPLLMQMTQAQPKGQLLSENVNTNXTRYPSSLLQTTEEEDLSTGVSGNAIACSRNITTTYNPVQQKSSLVKVAMNRDDKSTAKKPQVVRSLEIHRKFVAALFQQEGTSGVKESVVLFKSYDMFNDLHHQKSHDWDLTNTGMTYDASQHAKPSQTTLFSAPQDAIHESFSSMQETDLHTDTTSIGKAMFSTGEGMHQSSLQNIGQHRAITFFXDNSVRVKAERIPDPSCQINNLFSDQYGQEDLVSAFLKQQEGVGTAENEFDFDGYSLDNIPV

SEQ ID NO: 30927 - protein, 100 aa, Glycine max
  unsure (1)..(100): unsure at all Xaa locations
  Clone ID: TF_LIB3109-028-Q1-K1-G3.pep
NGSGDSGLVLSTDAKPRLKWTPDLHARFIEAVQQLXGADKATPKTVMKLIGIPGLTLYHLKSHXQKYRLSKSLHGQSNNMTHKITINSGAATDERLRENN

SEQ ID NO: 30928 - protein, 412 aa, Glycine max
  unsure (1)..(412): unsure at all Xaa locations
  Clone ID: TF_GmC27103_1.pep
MGSVAAEELNLDLRSSFVPKTITDFLRHLSANNNHPATLRDFLSRLEDELRKIHAFKRELPLSMLLLNDAISVLKVESQKCCRVARDSPPVLEEFIPLKKELGDQSEEEEENDDDKDDNECRDKRNWMSSVQLWNNNTTTTTTNNNNNASDRKQLLHKLQTKKSEEGQSVAEDPFQTCSNRNGGRRAFMPFSRYSSSSSSVPVTTVGLGAASKEEKEESVRNRLSLLTPSVKAWCGSRGSRSSSIRAVSSSPPTAQAGFACXSVPKPKQIRERCWSHELHRRFVNALQKLGGSQAATPKQIRELMQVDGLTNDEVKSHLQKYRLHTRRVPAASSNQPVVVLGGLWMSQDQYNDSSKVSSSGSGSPQSPLHLAAGSRGGTSPTEGDSIEDDEDARSESYSWKSHMNKPGKVDV

SEQ ID NO: 30929 - protein, 78 aa, Glycine max
  Clone ID: TF_701008362H1.pep
QHIPSGEVVGKSSSTASQSKARTTRTPELHEAFAAAVNHLGGRVTATPHGVLNQMTVEGLDIDHVQRHLQNYRTASYK

SEQ ID NO: 30930 - protein, 389 aa, Glycine max
  unsure (1)..(389): unsure at all Xaa locations
  Clone ID: TF_GmC575_1.pep
MYFFTEKMHSLKMGFPDYIQTLEEERRKIQVFSKELPLSLELVTQAIEACKQQLSGTASEYNLNGHSECSEQTTSTEGPVLEEFIPIKKMASSSPFCDEEDEDDEQHSHKQRVSKENNNSDKRKSDWLRSVQLWNPDPPAEEDVNKKVPGLELKRSGNGGAALHPPRLLGCGALPRVSVSKAPSSTSVAAASSSAAEPAAEKSLNEGQRKLRRCWSQDLHKRFLHALQQLGGAXVSISIYTATPKQIRELMNVDGLTNDEVKSHLQKYRLHTRRPIPMVHNSSDPQAAPFVLVGNIFVQSPEYAAVATSTASREVATVAAPARIYAPVATHPTPVSHPPDDSIKNPQFKKVKLFEHSNSDDRANHSEGAVHSNSPTSSSSTHTSTSLGY

SEQ ID NO: 30931 - protein, 249 aa, Glycine max
  Clone ID: TF_GmC62574_1.pep
MAACRAATATRFNGFSGDAFKSYFPLHQYGVGPSEASSGFMRSRFLQKLPNKRSMRAPHASGTSTLHARFVHAVELLGGHERATPKSVLELMDVKDLTLAHVKSHLQMYRTVKTTDKPAASSGHSDGSGEDDLSPMVSTADRGGLRQFPNHRGRPEWAAQQDMDYSSTTTTLWSNSSSCGESRLRPSSNDIDGLRSPILHSQTISGGHQIQECDSIQLKSNMPGSNLECKIPSLEFTLGRPDWDGKEQA

SEQ ID NO: 30932 - protein, 258 aa, Glycine max
  Clone ID: TF_GmC12582_1.pep
AAAGAYRAATATRFNGISGEAFKSHHPLHHHHSSSPHYGVGLGPSHETSAGLMRSRFLPKLPAKRSMRAPRMRWTSTLHARFVHAVELLGGQLEATPKSVLELMDVKDLTLAHVKSHLQMYRTVKTTDKPAASSGLSDGSGEDDMSPMGSSGGMRQFSDQRSLSDRPLQQDMDYSSGNNTLWSNSSSSRETWQQNNSNDVDGFRPPIFQSQQISGGHQIQECDSTQLKNSLSGSNLECKNPSLEFTLGRPDWNGKGQA

SEQ ID NO: 30933 - protein, 344 aa, Glycine max
  Clone ID: TF_GmC51280_1.pep
MDPQSMHFVLSTDSKPRLKWTPELHRRFIEATNQLGGADKATPKSLMRVMGIPGLTLYHLKSHLQKYRLGKSQELETCSDNKQEDYIETKSSSDGHCSREISIGAQNQLTENMQIAQALQMQMEVQRKLHEQIEVQKHLQLRIEAQGKYLQSVLKKAQEALAGYNSSPVGIELTKAELSQLVTIINNACPSSPISELTETRGLSLSCGERKRDRGTMCSLESSLTSSESSGRKEEKQPMEEIVEFKSSINVSLQLPLMEILTEDKASNGGSSNEASGRKRSATAAESDDGSCVVEQPCGKRCGNKLRKAKLSEMLDLNSQCQSDMDSTSSKTLDLNCSLNFWEP

SEQ ID NO: 30934 - protein, 185 aa, Glycine max
  Clone ID: TF_18691984.pep
LVDVHLPNMDGYEFLKHINKEIDIPVIIMSVDGSTSAVRKAITHGACDYWTKPFSENQFKIMWKHVAMKAWNEKKLQKKDFSEFASSVLDANLKDQKEISSNSKESDVDDCDAQPKKPRIAWKGELHCQFVKAVMHIGLDKAQPKKILEVMNIPGLTKDHVASHLQKYRFDLKKSNEVAVQQNEM

SEQ ID NO: 30935 - protein, 101 aa, Glycine max
  unsure (1)..(101): unsure at all Xaa locations
  Clone ID: TF_LIB4392-050-R1-K1-E7.pep
MVPHKSQGGVEQLANAGVLGGSAVKIAAAPAGGSGKQRLRWTSDLHDRFVDAITQLGGPDRATPKGVLRVMGVPGLTIYHVKSPLQKYRLAXYLPESPADG

SEQ ID NO: 30936 - protein, 207 aa, Glycine max
  Clone ID: TF_GmC594_2.pep
ELHRKFVAAVNQLGLDKAVPKKILDLMNVEGLTRENVASHLQKYRLYLKKAAQQANMVAALGGSDSYLRMGSIDGYGDFCTSSGSGRITNTTLPSYASTGIFSRLNSPAALNMRAISSSALIRPVQSQNINCSLNTLGNIQPSVFPANHSSSLLQGIPTSIELNQSKQSNCTTGISQLSQVELYLWTFVSHLIRSISFFFQSCSVSP

SEQ ID NO: 30937 - protein, 258 aa, Glycine max
  Clone ID: TF_GmC942_1.pep
MYACFGDKAIRFRFKVDWTPELHKKFVKAVEQLGIDQAIPSRILEIMKVEGLTRHNVASHLQKYRIHKRQSAPREEDRKWHNQRDAMQRNYYMQRPIMAYPPYHSNHTLSPAPIYPMWGQPGSQTAGVQIWGHPGYNIWHPTESCHWKPYQGVHVDAWGCPLLPAPQAPCFPYNQNIPGLHNPKAVDYRFGMPQSSFEHHPAEEVVDKVVKEAISKPWLPLPLGLKPPSMDSVLAELSKQGISGIPLGNKRSSTPKLR

SEQ ID NO: 30938 - protein, 696 aa, Glycine max
  unsure (1)..(696): unsure at all Xaa locations
  Clone ID: TF_GmC577_1.pep
MTVEKKMNDSGDEFPVGMRVLAVDDDPTCLLVLETLLRRCQYHATTTNQAIKALALLREHKDKFDLVISDVHMPDMDGFKLLELVGLEMDLPVIMLSANGDTKLVMKGISHGACDYLLKPVRMEELKNIWQHVIRRKKFDSKEKNKTRNIDKPTSNSSNGLGSSGTGNSDHNEKLTKKRKDQDRTAYEQQXNDHDNDDPSAQKKPRVVWSVELHRKFVAAVNQLGIDKAVPKKILDLMNVEKLTRENVASHLQKYRLYLKRISCVANQQTNMVVALGGADPSYLRMNSVSGVGHIQSISGSGQLHNNAFRSFPPSGIINRLNTPAGLNVHGFPSGVLQLSQSQNLKNTNDNLKFQSAIVPANQNGVHGMTVSVGLDQLQNNKGVMSVQNLTTVFDAKTTFPISNKLPDPRPKITNSGSHTPDVSFSNNALMLEPRPQGTQGSVRIETLSSSVASQHSEFSLSLLDQGRYSDNWASTVQPSVIQTNSYPPSECFGQTNIPPTDNMASVPLQGGNLSGASITSLSRQSYDSMTDMHSEGVTFTNRPGHISSNVPYQGWHDNNQDATHHSNILSINSLTPVNGAAVPAGHAAMNSALHRNLDFNYCDPLQMKHEGFVELTDEALSKQHQGNIMNLPKSQQSHFSNNLGSLEDLVSSMMKQENDKMKLLDGNLICNNYSGGLSRCDSRFSSTFQNIMHPR

SEQ ID NO: 30939 - protein, 506 aa, Glycine max
  Clone ID: TF_GmC606_2.pep
DMDGFKLLEHVGLEMDLPVIMMSVDGETSKVMKGVQHGACDYLLKPIRMKELRNIWQHVFRKKIHEAKEFESFESIHLMRNGSELSDDGNLFAVEDVTSSKKRKDADSKHDDKECLDPSSTKKARVVWSVDLHQKFVKAVNQIGFDKVGPKKILDLMNVPWLTRENVASHLQKYRLYLSRIQKENDQRSSSSGMKHSDFPSKDMGSFGFQNSVIKQQNDVAIDNYNHSDGSLQLQNVETKSHEADPKGIVSQSTIAKKGRILTGNIADTNMRESLRVGLNQTFPPLESEGNHAVFDCSMPTPYSWTEVPHMQLKEEHKSLVYLEDSFNQLPLHGKQQQHIHVDQSQSVASISSAPSITEEEAAACIEPKPLFADYNNDYASSVSSTGNAVATFPIQPGSLIMNGQSSERISTTTSGLKTQEYNNLSSISDQEIYQRNLLGCEAASASLDEDLHFYWLEGECYNNMNFGLQNIGMSEYYDPGLISEAPIHLYDSADYSVMDQGLFIA

SEQ ID NO: 30940 - protein, 487 aa, Glycine max
  unsure (1)..(487): unsure at all Xaa locations
  Clone ID: TF_GmC29852_1.pep
MDRPAAIFSDTVNLNGTVTQLSLLADGRLWWPEGGQRNLSIEKEVLGFTGDGPDIRLKTIVETEDGCCGGASRAKLVRNDVVFRPSSEETHRLWCQKLGEFIDSLGRPKRLFVFVNPFGGTKSAVIVFRDQVKPLLEDAQVQLTVQETKHQLHAKQVVQSLDFSKYDGIVCVSGDGILVEXVVNGLLQRQDWDTAIKMPLGVVPAGTGNGMAKSLLDSVGDPCTVPNAVLAIIRGRKRKLDVATITQGETRFFSVLMLAWGLVADIDIESEKYRWMGSARIDFYALTRILHLRHYIGCLYFVPAPGFEAYGDPTSYPGSSNNKGSNSELIDEEPLKLQRLGYQGPEIDLENQSWRVLNGPFISVWLHNVAWGAENTKAAPDAKFSDGYLDLIITKNCPKLPLLSLMSDLNNGGHVKSPYVMYLKVKVLVLEPGPRLGDQEKEGIIDADGEVLARGKGSYQCEQKALMAYDKLQITVDQGLATIFSPI

SEQ ID NO: 30941 - protein, 44 aa, Glycine max
  Clone ID: TF_LIB3242-572-P1-J1-E2.pep
LHEAFVEAVNHLGGSEKATSNGVLNLMKVAGLTLFNVRSLLQLI

SEQ ID NO: 30942 - protein, 153 aa, Glycine max
  unsure (1)..(153): unsure at all Xaa locations
  Clone ID: TF_LIB4392-004-Q1-K1-A1.pep
MVCTANDFTXWKDFPKGLRVLLLEGDSSSAAEIRXQLEAMDYKVSTFYDENEALSALSSSPKGFHVAIVEVSTSCSLGGFKFLENAKDLPTIMTSKDQCLNTMMKCIALGAVEFLSKPLSEDKLKNIWQHVVHKVDWTPELHKKFVKAVEQLY

SEQ ID NO: 30943 - protein, 371 aa, Glycine max
  Clone ID: TF_GmC200_1.pep
MVVCDFWELSLAQSQRKTPKSNIIMEPSLDLRLGFVPKPLSLFFGDVSGNRDKCDKVVTLDGFVQRLEEELTKVEAFKRELPLCILLLNDAIARLKEEKVKCSGMQDPPLKTSSGGNENENSARQKGNWMSSAQLWSTQKTKSRNEEDDRSVPANPINGNSCVLEKEGSQVPRFGLMARASELSHSNSKSVGGDISSGSSLLRVEVQSQPQPPQHMQQNPRKQRRCWSPELHRRFVDALQQLGGAQVATPKQIREPMQVEGLTNDEVKSHLQKYRLHVRRFPVSSTGQADNGSWMSQDESGDKSKGNNMSQSGSPQGPLTPLILGGAGGGSAKGLSSPGQNSVDGEDEQSDCRNWKGGLHHHQLEADNQCL

SEQ ID NO: 30944 - protein, 54 aa, Glycine max
  unsure (1)..(54): unsure at all Xaa locations
  Clone ID: TF_LIB3028-002-Q1-B1-G9.pep
QCWSPEFHSRFIKALDVPRCSQTSTQNEIKELMTVDXLTTSEVQTHLQNKRLHT

SEQ ID NO: 30945 - protein, 606 aa, Glycine max
  Clone ID: TF_GmC577_2.pep
ARRRQKGREHKDKFDLVISDVHMPDMDGFKLLELVGLEMDLPVIMLSANGDTKMVMKGISHGACDYLLKPVRMEELKNIWQHVIRRKKFDSKEKNKTSNLDKPTSNSGNGLGSSGTGNSDQNEKLTKKRKDQDEDEDEDQENDLDNEDPSAQKKPRVVWSVDLHRKFVAAVNQLGIDKAVPKKILDLMNVEKLTRENVASHLQKYRLYLKRISCVANQQANMVAALGVADPSYLRMSSVSGVGHVQTLSGSGQLHNNNFRSFPPSGIINRLNTPAGLNVHGFPSGVLQLSQSQNLNNANDHHKFQSVIVPVNQNGVQGMTVSVGLDQLQNNKVVMSVQNLTTVFDAKTTFPIPNKLPDPRPKITNSVSHTSDVHFSNNALMLEPRPQGSQGSVRIGTLSSSVASQHSEFSLSLLDQGRYSDNWTSAVQPSVIQTNFFPPSECFRQTNIPPADNMASVPLQGGNLSGPSITSLSRQSHDSMTEMHSEGMTFTNRPGHTSSNVPFQGWDDHNQDATHHSNIMSINSLTPVNGAAVQAGHAATNSVLHRNLDFNYCDPLQMKHEGFVELTDETLLKQHQGNTMDQQKSQENHFSNNLGSLEDLVSSMMK

SEQ ID NO: 30946 - protein, 379 aa, Glycine max
  Clone ID: TF_GmC89825_1.pep
MQFAEKMQPLKMGFREYIEALEEERKKIQVFPKELPLSLELVTQAIEACRQQLSGTVAEYNLNAQSECSEQTSTDGPVFEEFIPIKKRASQESVEEEDEDEEHFHKHKKTATDKKKSDWLRSVQLWNPNPPPTKEDVVVPRKTDVVEVKRNGGAFQPFQREEKSGDAKASINNDASAIGKAPSSPPVPATSSTGPVRVENKKEEKGQAQRKQRRCWSQELHKRFLHALQQLGGADSATPKQIRELMKVDGLTNDEVKSHLQKFRLHTRRSPIIHNNASSQAGPLFLVGNIFVQPSEYAAVATTSTASGEELTTVTTTTAPTGIYAPVAAHPPAVTHTLPIMKQKEHSHSEERPNHSVLSNSPASSSSTHTITTSPPVPN

SEQ ID NO: 30947 - protein, 582 aa, Glycine max
  Clone ID: TF_GmC606_1.pep
MVNGCFSSSPRHDAFPAGLRVLVVDDDLTWLRILEKMLKKCLYEVTTCCLATEALKKLRERKEAYDIVISDVNMPDMDGFKLLEQVGLEMDLPVIMMSVDGETSRVMKGVQHGACDYLLKPIRMKELRNIWQHVFRKRMHEARDFESHEGFDFEGIHLMRNGSDHSDDGNLFAVEETTSIKKRKDADNKHDDKEFGDHFPTKKARVVWSVDLHQKFVKAVNQIGFDIGPKKILDLMNVPWLTRENVASHLQKYRLYLSRLQKENDQKSSSSGIKHSDSPSKDLGSFSFLNTANKQQNDIATDSFSYSDGTLLIQMDATSYEGDLKGIVSEPTTEKRRASTSEIPDPKVQKSSQKSLNKPFTSVESSEANHAVFDCTIPTEYSWSEFPKGPLKEEQKTPVQLEDSLCQLPLHGTQHHIQIDQSQSIASINSNPSITEEEVAAKLETKPLYAGYESDYVNPVSSIGSAVEAFRSQSKSLMVSDQSSEPTFTSNLSLKTQGFNLDCISDLDFYQRNLLLGGEVASAPLDEDLNFFLLQSECYNMNFGLQNIDMSEYYDPRLTAEVPSHFYDSADYSSVDQSLFIA

SEQ ID NO: 30948 - protein, 344 aa, Glycine max
  Clone ID: TF_GmC13720_1.pep
ETVIYIYIYIYFFFLRLQLTRANAARETSEYDEERVMEWEAGLPTANDLTPLSQPLIPPELASAFSILPEPHRTLLDVNRASRNTLSTLRGGGGSVHQAFSSSNNNHNYDGDGDGGVEEEEEEDDDRDGSGPDSRKQRKIDCGAAEEADSAVQTETSAERTAVKRPRLVWTPQLHKRFVDVVAHLGIKNAVPKTIMQLMNVEGLTRENVASHLQKYRLYLKRMQGLSNEGPSASDQLFASTPVPQSLHDSAPPSNHSNGHGHGHGHSNGRGHGHGHGHGHLSVPMMSMPYPPPLMSMPYPPPMMSGMPHGHMGIPMPNSSATSAYHPYNMLHQRDWPHLAPNDK

SEQ ID NO: 30949 - protein, 257 aa, Glycine max
  Clone ID: TF_GmC381_1.pep
MYPRLIHPHDGIVTQDELQGGAASNLSHAHKGDPCLVLTADPKPRLRWTQDLHERFVDAVTQLGGASKATPKAIMRTMNVKGLTLFHLKRHLQKYRLGKQSGKDVGEGCKDGSYLLESPGADNTSPKLPTPDTNEGYEIKEALRAQMEVQSKLHLQVEAEKHLQIRQDAERRYMAMLERACKMLADQFISATVIDTDSQKFQGIGSKAPRGTLVDPLGFYSLPSTEVSGVNCPGRRNTAKSPTPKGRLFNRKLFNLT

SEQ ID NO: 30950 - protein, 418 aa, Glycine max
  unsure (1)..(418): unsure at all Xaa locations
  Clone ID: TF_GmC59217_1.pep
MYLHQQHQGKNIPSSSRMPIPSERHMFHHTGSERHMFLQTGNGSGDSGLVLSTDAKPRLKWTPDLHARFIEAVQQLGGADKATPKTVMKLMGIPGLTLYHLKSHLQKYRLSKSLHGQSNNVTHKITINSGAATDERLRENNETHMNSLNLAPQSNNKDLYISEALHMQIEERRRLNEQLEVQRLLQLRIEAQGKYLQAVLEKAQETLGRQNLGAVGLEATKLQLSELVSKVSSQCLNSAFSDRLKEIQGFSPHQQXKTNQPNTNDCSMDSCLTSCEGSQKEQEIQNGGMSLRPFNVHTFMERKEVIEGPNLNNLPNTDLNWCDPVKKNTFLTPLSMHADKRSPSNLSSIGLLEGETTENRSTIVRTESIKPAVAEKVSQDYGLPSNYFAASKLDQTTEDNKDTKTSCKQLDLNGFSWN

SEQ ID NO: 30951 - protein, 384 aa, Glycine max
  Clone ID: TF_GmC381_2.pep
MQKRREESDKIPVKRDSASSLPQPQSLVLFTSPFSPFPFLLPLSFAKWVIISFSHNTIFFTFSFFFASLRWGFKFHHRNRMFSRLIHPHEGQEDMQGGSNHAHLGDPCLVLTSDPKPRLRWTADLHERFVDAVTQLGGASKATPKAIMRTMNVKGLTLYHLKSHLQKYRLGKQSGKDSDEGLKDASYLQESPGTDNSSPKLPASDANEGHEVKEALRAQMEVQSKLHLLVEAEKHLQIRQDAERRYMGMLERACKMLADQFIGDVIIDRDGQKFQGLENKTSRSPLVDHGGFFPAACTEVGGMHVSEVPPILQPQGAECSSESCLKSLESLGGLTLEGSPGGSKKRMLNLDSMVAPLIWSEANTRTQGIHLAQVNPPGMTRYGM

SEQ ID NO: 30952 - protein, 307 aa, Glycine max
  Clone ID: TF_GmC381_4.pep
MFSRLIHPHEGQEDMQGGSNHAHLGDPCLVLTSDPKPRLRWTADLHERFVDAVTQLGGASKATPKAIMRTMNVKGLTLYHLKSHLQKYRLGKQSGKDSDEGLKDGMSASYLQESPGTDNSSPKLPASDANEGHEVKEALRAQMEVQSKLHLLVEAEKHLQIRQDAERRYMGMLERACKMLADQFIGDVTIDRDGQKFQGLESKTSRSSLVDHVGFYPQACTEVGGMHASVVSPILQPQGADCFTESCLTSLESLGGLTLEGSPGGSKKRMLNLDSMVAPLIWSEANTRTQGIHLAKVNPSGMTRYGM

SEQ ID NO: 30953 - protein, 125 aa, Glycine max
  Clone ID: TF_GmC381_6.pep
MFSRLIHPHEGQEDMQGGSNHAHLGDPCLVLTSDPKPRLRWTADLHERFVDAVTQLGGASKATPKAIMRTMNVKGLTLYHLKSHLQKYRLGKQSGKDSDEGCKDASYLEESPETDNSSAKVPDAG

SEQ ID NO: 30954 - protein, 221 aa, Glycine max
  unsure (1)..(221): unsure at all Xaa locations
  Clone ID: TF_LIB4390-015-R1-K1-H4.pep
MAGECSQAMASKSNADQNIKLGQKRKEQSEDEEEEEYDQENEEPSNQKKPRLVWDAELXYDXLAAINHLGIDTPNAFPKRILDLMNVEGLTRENIASHLQKYRLGLKKSTQQPSMVATLGNSDPYQQMDSIEGFRTLSGSGGMISTTLPSYASGGLFCRLNSPSGLRGINSSLLVQPVHSQNIDSKSIKTLGNMQLSMFSAQTSSLLQGHSNINRWVTIFS

SEQ ID NO: 30955 - protein, 167 aa, Glycine max
  Clone ID: TF_jC-gmro02800038h07a1.pep
ARGFLHALQQLGGADTATPKQIREIMNVDGLTNDEVKSHLQKYRLHTRRPSPMVHNSSNPQAAPFVLVGNIFVQSPEYAAVATSTASREVATVAAPAGIYAPVATHPIPVSHPPADSIKNPQFKKVQLFEHSISDERANHSEGAVHSNSPTSCSSTHTSTSLAIEFK

SEQ ID NO: 30956 - protein, 228 aa, Glycine max
  Clone ID: TF_GmC436_1.pep
MKNSKKTCARKYHKSENPRLRWTPELHEYFVEVVEGLGGKNKATPKSILHMMHVKGLRISHIKSHLQMYRNMKGGTILTSMQQEMEENVHVKDHHPICSNCSSQSIIFRSQGTKFKLKASKYDTGIVNQEIHPLENKGLSQTSETDYDLNQEPESSACLFSESSNEEKSRTMKFLDLSLSFGSSPIPTMDGDQERMRFSSPNTADNHVIDSNSVQSHGSNYINLDLTI

SEQ ID NO: 30957 - protein, 154 aa, Glycine max
  Clone ID: TF_GmC381_8.pep
MFSRLIHPHEGQEDMQGGSNHAHLGDPCLVLTSDPKPPLFQSADLHERFVDAVTQLGGASKATPKAIMRTMNVKGLTLYHLKSHLQKYRLGEQFGKDSDEGCQDGMSASFLQESPGADNSSPKFPGAHEGSEVKGAFLSPVGRAKTSLTRGGGE

SEQ ID NO: 30958 - protein, 409 aa, Glycine max
  Clone ID: TF_GmC498_1.pep
MSTSSRALPTPLENKYMKPPDSFQLSPVRDLTANSASSNSIRSAGKMFSSPSKCPDDFPFSSVSQHDRQYQDPPFVSQTIGDSVSSEIHSMTFISHPQENEDLSWGPDPCQDILGFPENVSVQHDQVENNGCYINDDNVKRSDFGEWVDQLMSIDDSLHPSWSQLLADDNVAEPKPKASQVPPQQHIPSGEVVGNSASTASQTKARMRWTPELHEAFVEAVNHLGGSEKATPKGVLNQMKVEGLTIYHVKSHLQKYRTARYKPEPSEGTSEKKVTPMEEMKSLDLKTSKGITEALRLQMELQKRLHEQLEIQRKLQIQIEDQGKRLQMMFEKQREMGDSKVNVSLDEPSAAAPSDTVETTNEERHKFESIPKAIPEEKESSTTKQIAGEAEEMIKEDEVAPPTKRVKSS

SEQ ID NO: 30959 - protein, 451 aa, Glycine max
  Clone ID: TF_GmC1091_1.pep
MASPSELSLDCKPQSYSLLLKSFGDQTDHSYKLEEFLNRLEEERLKIDAFKRELPLCMQLLTNAMEASRQQLQAFKVNHGAKPVLEEFIPMKHLASESSEKATNMSDKANWMTSAQLWSQASSEGTKQQPPITTLKESDIGFSISPKLALDNKQRNGGGAFLPFSKERNSCQGSTLRPLPELVLASAEKEMEDKKRAEVEIKGVSCQSRKENSGSDGAVVDQGKGGSPVASSHAQTTTTTTSAQTHRKARRCWSPDLHRRFVNALQMLGGSQVATPKQIRELMKVDGLTNDEVKSHLQKYRLHTRRPSPSPQAGAAAPQLVVLGGIWVPPEYATAAHTATPTLYGAHPTSHAPPPHYCAATPMPQDFYTTAPPQPLLPPPPPHHNALHHLHMYKAAPHGQGSPESDVPSNGERSESIEDGKSESSSWKGENEGERKGISKGSNGSEITLKF

SEQ ID NO: 30960 - protein, 267 aa, Glycine max
  unsure (1)..(267): unsure at all Xaa locations
  Clone ID: TF_GmC496_1.pep
RAAARRRQKGDYMLGQSSCALYLSLRYHLLHPDYLFYRIRKLQKNFKLRVVLCHVXEDVIKPLLEVTKTALLHDCTLLYGWSLEECGRYLETIKVXENKPADIIQGQMDTDYLSRLTHALTTVRHVNKTDVVTLGTTFGSLCNIMGASMEDLARCPGIGERKVKRLFDTFHEPFKHVESSRQAIPETSVQNKPASPNNAESSSLIEDKHEDAEDVSXRRKKELEVTVKSALSAAFAKYSGRVGKRKSTSQVEEKGESIISKESEAET

SEQ ID NO: 30961 - protein, 151 aa, Glycine max
  Clone ID: TF_GmC184192_1.pep
SITIKSKDAAQSPLRKALSPININGNQKPLESQTPFLATCSTNKGPQKNDTPLGKFSTRIGKFSTRSFTLKNCLVQEYIDFLNNASREELLELKGIGEKMAEYIIDLREESPLKSLNDLEKIGLSSKQAHNLFTKAAKTLFEDKAEDSILG

SEQ ID NO: 30962 - protein, 270 aa, Glycine max
  Clone ID: TF_GmC708193_1.pep
MEKKTRNHVVLNSGMEKKTRNHVVLNSGVEKDDSFSKARENVKLDLMVQNDDSSFNANIEVELNPLADQGISVDEEDHQKEHTPYARNYSEALAKIVQEDHSMNKENNNSRAIGDDSSATISSPPISSQLRDLSNSLKMLYSSTPSCMQIPEKEPIPLDIVEPKTPTIEQNMSINRLDAMNAKSPWETFSMRGSGMKSSLVQEYLRFLNTANKEELKKLKGIGEKRATFILELREESPEPFKSLDDLKDIGLSAKQVKGIMKKEVGELFS

SEQ ID NO: 30963 - protein, 343 aa, Glycine max
  Clone ID: TF_GmC202_1.pep
MMAATMEQQQQRPQQQDEAEEIQHGPLPVEQLQASGIAATDVKKLKDAGICTVESVAYTPRKDLLQIKGISEAKVDKIIEAASKLVPMGFTSASELHAQRDAIIQITTGSTELDKILEGGVETGSITELYGEFRSGKTQLCHTLCVTCQLPLDQGGGEGKAMYIDAEGTFRPQRLLQIADRFGLNGADVLENVAYARAYNTDHQSRLLLEAASMMVETRFAVMIVDSATALYRTDFSGRGELSARQMHLAKFLRSLQKLADEFGVAIVITNQVVSQVDGSAVFAGPQIKPIGGNIMAHATTTRLALRKGRGEERICKVISSPCLAEAEARFQICAEGVSDVKD

SEQ ID NO: 30964 - protein, 103 aa, Glycine max
  unsure (1)..(103): unsure at all Xaa locations
  Clone ID: TF_LIB3242-368-Q1-J1-E12.pep
PEVGNHYYGLXHPFIPHQIRMTRALLTQDGGVQHIQFHKPSPTXYYHLCHLHADDYVXLLQNITPETQNDHLKQLIRYNVKQDRPIKNNQKNPSLSFTKGADP

SEQ ID NO: 30965 - protein, 224 aa, Glycine max
  Clone ID: TF_GmC129_2.pep
EYINELVEVDKEGGKQLCGGTFLNPGSWDAALLAAGTTLSAMKHLLNGDGKVSYALVRPPGHHAQPSQADGYCFLNNAGLAVQLALDSGCKKVAVIDIDVHYGNGTAEGFYRSNKVLTISLHMNHGSWGPSHPQSGSVDELGEGEGYGFNLNIPLPNGTGDKGYVHAFNELVVPSIQKFGPDMIVLVLGQDSNAVSYSIFAVGNLYFDHFSILLPSLCRLEFML

SEQ ID NO: 30966 - protein, 473 aa, Glycine max
  Clone ID: TF_GmC1634_2.pep
MESGGNSLPSGSDGVKRKVSYFYDPEVGNYYYGQGHPMKPHRIRMTHALLAHYGLLQHMQVLKPMAAKDRDLCKFHADDYVAFLRGITPETQQDQLRQLKRFNVGEDCPVFDGLYSFCQTYAGGSVGGALKLNHGVSHASVNWAGGLHHAKKCEASGFCYVNDIVLAILELLKIHERVLYVDIDIHHGDGVEEAFYTTDRVMTVSFHKFGDYFPGTGDIRDIGYGKGKYYSLNVPLDDGIDDESYQSLFKPIMGKVMEIFRPGAVVLQCGADSLSGDRLGCFNLSIKGHAECVRHMRSFNVPLLLLGGGGYTIRNVARCWCYETSVALGIELDDKMPQHEYYEYFGPDYTLHVAPSNMENKNSRHLLDEIRAKLLDNLSRLQHAPSVPFQERPPDAELLERDEDQDDRDERWDPDSDREADNDSNPVRRRVKSECVEAEDKDAVLGVDSMAVDEPCIKEEQDNLKELSDHRSR

SEQ ID NO: 30967 - protein, 130 aa, Glycine max
  Clone ID: TF_GmC974_3.pep
QCEQDSLAGDRLGCFNLSIDGHAECVSFVKRFNLPLLVTGGGGYTKENVARCWTVETGVLLDTELPNEIPENDYIKYFAPEFSLKIPNGQIENLNSKSYLSTIKMQVLENLRCIQHAPSVQMQEVSSYLK

SEQ ID NO: 30968 - protein, 121 aa, Glycine max
  Clone ID: TF_GmC1790_2.pep
MDTGGNSLPSAPDGVKRKVCYFYDPEVGNYYYGQGHPMKPHRIRMTHALLAHYGLLQHMQVHKPFPARDRDLCRFHADDYVAFLRSITPETQQDHLRQLKRFNVGEDCPVFDGLYSFCQTY

SEQ ID NO: 30969 - protein, 429 aa, Glycine max
  unsure (1)..(429): unsure at all Xaa locations
  Clone ID: TF_GmC974_1.pep
MRSKDRIAYFYDGDVGSVYFGAKHPMKPHRLCMTHHLVLSYDLHKKMEIYRPHKAYPVELAQFHSADYVEFLNRITPDTQHLFLNELTKYNLGEDCPVFDNLFEFCQIYAGGTIDAARRLNNQLCDIAINWAGGLHHAKKCEASGFCYINDLVLGILELLKYHARVLYIDIDVHHGDGVEEAFYFTDRVMTVSFHKYGDSFFPGTGDAKEIGEREGKFYAINVPLKDGIDDSSFTRLFKTIISKVVETYQPGAIVLQCGADSLAGDRLGCFNLSIDGHAECVSFVKRFNLPLLVTGGGGYTKENVARCWTVETGVLLDTELPNEIPXNDYIKYFAPEFSLKVPNGPIENLNSKSYLSTIKMQVLENLRCIQHAPSVQMQEVPPDFYIPEFDEDEQNPDERIDQHTQDKHIQRDDEYYDGDNDNDQMNIS

SEQ ID NO: 30970 - protein, 476 aa, Glycine max
  Clone ID: TF_700841470_FLI.pep
MGMEEESSNNSSIIEGGASLPSTGSDAKKRRVTYFYEPTIGDYYYGQGHPMKPHRIRMAHNLIVHYSLHRRMEINRPFPASPADIRRFHSDDYVDFLSSVSPENLADSAFSRHLKRFNVGEDCPVFDGLFPFCQASAGGSLGAAVKLNRADADIAINWAGGLHHAKKSEASGFCYVNDIVLGILELLKVHRRVLYVDIDVHHGDGVEEAFYTTDRVMTVSFHKFGDFFPGTGHVKDIGVGSGKNYAVNVPLNDGMDDESFRSLFRTIIQKVLEVYQPEAVVLQCGADSLSGDRLGCFNLSVRGHADCLRFLRSFNVPLMVLGGGGYTIRNVARCWCYETAVAVGVEPDNKLPYNEYYEYFGPDYTLYVDPSNMENLNTPKDMEKIRNTLLEQISQLPHAPGVPFQTTPPTLQLPEEAEEDMDRRPKLRKWDGEDYDSDPDEGGKANSKFPNVTAHMRDITDEMEEEKPEVHPSSCC

SEQ ID NO: 30971 - protein, 150 aa, Glycine max
  unsure (1)..(150): unsure at all Xaa locations
  Clone ID: TF_GmC141697_3.pep
MERENDNSAKSSVNGQRRVGLLYDERMCKHHTPDDEDHPETPNRIRAIWNKLQSTGVPQRCVILEAKEAEDKHLLLVHSENHVNLIKNISSKQFNSRRHKIASKLDSIYFNXGSSEAAYLAAGSAVKVXERVASRELDSAVAIXRPXGHH

SEQ ID NO: 30972 - protein, 405 aa, Glycine max
  unsure (1)..(405): unsure at all Xaa locations
  Clone ID: TF_uC-gmflminsoy057h02_FLI.pep
RMEINRPFPASPADIRRFHSDDYVDFLSSVSPETLADSAFSRHLKRFNVGEDCPVFDGLFPFCQASAGGSLGAAVKLNRADADIAINWAGGLHHAKKSEASGFCYVNDIVLGILELLKAHRRVLYVDIDVHHGDGVEEAFYTTDRVMTVSFHKFGDFFPGTGHVKDIGVGSGKNYAVNVPLNDGMDDESFRSLFRSIIQKVMEVYQPEAVVLQCGADSLSGDRLGCFNLSVRGHADCLRFLRSFNVPLMVLGGGGYTIRNVARCWCYEXVAVGVEPDNKLPYNEYYEYFGPDYTLYVDPSNMENLNTSKDLEKLRNTLLEQISRLPHAPSVPFQTTPPTLQLPEEAEENMDRRPKLRKWDGEDYDSDPEEGGKDNSKFSNITAHMRDIADEMEEEKPEEHPSSCS

SEQ ID NO: 30973 - protein, 181 aa, Glycine max
  Clone ID: TF_GmC382331_1.pep
GTIFPGKCYSIPARGLEPEELITVHSLEHIESVEVTSESLSSYFTSDTYANEHSALAARLAAGLCADLASAIVSGRAKNGFALVRPPGHHAGVRQAMGFCLHNNAAVAALAAQAAGARKVLILDWDVHHGNGTQEIFEQNKSVLYISLHRHEGGKFYPGTGAAEEVHDCRQIFKLNCCCWQ

SEQ ID NO: 30974 - protein, 214 aa, Glycine max
  Clone ID: TF_GmC1063_1.pep
ARGIFGNVAIAARYSQRVHGLKRVFIIDFDVHHGNGTNDAFYDDPDVFFLSFHQDGSYPGTGKFDEVGSGDGEGTTLNLPLPGGSGDTAIRTVFDEVIVPCAQRFKPDIILVSAGYDGHVLDPLANLQYTTGTYYMLASSIKQLAKDLCGGRCVFFLEGGYNLKSLSYSVADTFRALLGDRSLASEFDNPNILYEEPSTKVKQAIQKIKHIHSL

SEQ ID NO: 30975 - protein, 472 aa, Glycine max
  Clone ID: TF_GmC305_1.pep
MGMEEESSIIEGGASLPSSGSDAKKRRVTYFYEPTIGDYYYGQGHPMKPHRIRMAHNLIVHYSLHRRMEINRPFPASPADIRRFHSDDYVDFLSSVSPETLADSAFSRHLKRFNVGEDCPVFDGLFPFCQASAGGSLGAAVKLNRADADIAINWAGGLHHAKKSEASGFCYVNDIVLGILELLKAHRRVLYVDIDVHHGDGVEEAFYTTDRVMTVSFHKFGDFFPGTGHVKDIGVGSGKNYAVNVPLNDGMDDESFRSLFRSIIQKVMEVYQPEAVVLQCGADSLSGDRLGCFNLSVRGHADCLRFLRSFNVPLMVLGGGGYTIRNVARCWCYETAVAVGVEPDNKLPYNEYYEYFGPDYTLYVDPSNMENLNTSKDLEKLRNTLLEQISRLPHAPSVPFQTTPPTLQLPEEAEENMDRRPKLRKWDGEDYDSDPEEGGKDNSKFSNITAHMRDIADEMEEEKPEEHPSSCS

SEQ ID NO: 30976 - protein, 349 aa, Glycine max
  Clone ID: TF_GmC1092_1.pep
ASTKCEASGFCYVNDIVLAILELLKQHERVLYVDIDIHHGDGVEEAFYTTDRVMTVSFHKFGDYFPGTGDVRDIGYGKGKYYSLNVPLDDGIDDESYHFLFKPIIGKVMEVFRPGAVVLQCGADSLSGDRLGCFNLSIRGHAECVKYMRSFNVPLLLLGGGGYTIRNVARCWCYETGVALGIEVDDKMPQHEYYEYFGPDYTLHVAPSNMENKNSRHLLEEIRSKLLENLSKLQHAPSVQFQERPPDSDLGEADEDHDDGDEPWDPDSDMDVDVERELVSSKVKKEIAEPQPNDLEDQRSGEHLRDSDTAVAETCMKALDISSQKADEDNVKVEQNTVNDLAKETDLKG

SEQ ID NO: 30977 - protein, 190 aa, Glycine max
  unsure (1)..(190): unsure at all Xaa locations
  Clone ID: TF_LIB4201-008-Q1-K1-G3.pep
MESGGNSLPSGSDGVKRKVSYFYDPEVGNYYYGQGHPMKPHRIRMTHALLAHYGLLQHMQVLKPTAAKDRDLCKFHADDYVAFLRGITPETQQDQLRQLKRFNVGEDCPVFDGLYSFCQTYAGGSVGGALKLNHGACDVAINWAGWSTSCXGSVRASGFCYVNDIVLAILELLXIHERVLYVDIDIHHGD

SEQ ID NO: 30978 - protein, 470 aa, Glycine max
  unsure (1)..(470): unsure at all Xaa locations
  Clone ID: TF_GmC305_2.pep
MGMEEESSNNSSIIEGGASLPSTGSDAKKRRVTYFYEPTIGDYYYGQGHPMKPHRIRMAHNLIVHYALHRRMQVNRPFPAAEADIGRFHADDYVDFLSTVSPQILSENSHSHYRQLKRFNVGEDCPVFDGLFDFCRASAGGSIGAAVRLNREDADVAINWAGGLHHAKKAEASGFCYVNDIVLGILELLKVHRRVLYIDIDVHHGDGVEEAFYTTDRVMTVSFHKFGDFFPGTGHIKDIGVGAGKNYSLNVPLNDGLDDEXFRGLFRPIIQKVMDVYQPDAVVLQCGADSLSGDRLGCFNLTVKGHADCLRFLRSFNVPLMVLGGGGYTVRNVARCWCYETAVAVGVEPSPKLPYNEYYEYFGPDYNLHVEPSTMENLNTPRDLEKIRNTLLEQLSRLPHAPSAPFQTTPSVIEVPEEEEEDMDVRPKRRIWSGEDFDSDHDDDMASSKNSDLTAQTSRSVADDMDEDKD

SEQ ID NO: 30979 - protein, 174 aa, Glycine max
  unsure (1)..(174): unsure at all Xaa locations
  Clone ID: TF_GmC1790_1.pep
MDTGGNSLPSAPDGVKRKVCYFYDPEVGNYYYGQGHPMKPHRIRMTHALLAHYGLLQHMQVHKPFPARDRDLCRFHADDYVAFLRSITPETQQDHLRQLKRFNVGEDCPVFDGLYSFCQTYAGGSVGGAVKLNHDQCDIAVNWAGGLHHAKKCEASGFCYVNDIXLAILXLLKH

SEQ ID NO: 30980 - protein, 429 aa, Glycine max
  Clone ID: TF_GmC974_2.pep
MPSKDKIAYFYDGDVGSVYFGAKHPMKPHRLCMTHHLVLSYDLHKKMEIYRPHKAYPVELAQFHSADYVEFLNRITPDTQHLFLKELTKYNLGEDCPVFDNLFEFCQIYAGGTIDAARRLNNQLCDIAINWAGGLHHAKKCEASGFCYINDLVLGILELLKYHARVLYIDIDVHHGDGVEEAFYFTDRVMTVSFHKYGDLFFPGTGDAKEIGEREGKFYAINVPLKDGIDDSSFTRLFKTIISKVLETYQPGAIVLQCGADSLAGDRLGCFNLSIDGHAECVSFVKRFNLPLLVTGGGGYTKENVARCWTVETGVLLDTELPNEIPENDYIKYFAPEFSLKIPNGQIENLNSKSYLSTIKMQVLENLRCIQHAPSVQMQEVPPDFYIPEFDEDEQNPDERLDQHTQDKHIQRDDEYYDGDNDNDQMDVS

SEQ ID NO: 30981 - protein, 49 aa, Glycine max
  unsure (1)..(49): unsure at all Xaa locations
  Clone ID: TF_LIB4164-050-R1-K1-G7.pep
VVKRVASRELDSAVAIVRPPGHHAEQQEXMGFCLFNNVAVAARYLLDKK

SEQ ID NO: 30982 - protein, 151 aa, Glycine max
  unsure (1)..(151): unsure at all Xaa locations
  Clone ID: TF_GmC46078_1.pep
FDAARGDXXXCCDITXXXYAHMTNMLNXXXGXKLLVILEGGYNLRSISSSATAVIKVLLGESPGCELENSFPSKAGLQTVLEVLKIQMNFWPALGPIFVTLESQWRVYCFGRKRKQIKKRRRVLVPMWRWGRKSLLFHFLNGHLNVKSKLC

SEQ ID NO: 30983 - protein, 348 aa, Glycine max
  unsure (1)..(348): unsure at all Xaa locations
  Clone ID: TF_GmC1863_1.pep
MSSSSANDAEALRRNRILSSKLYFDVSPSKVPLIYSASYDIEFLGIEKLHPFDSSKWGRICGFLVSFGILDKKCVVEPLEASKDDLLVVHSESYLNTLKQSSKVAMIVEVPPVALIPNCLVQQKVLFPFXKQVGRTILAAKLAKERGWAINMGGGFHHCSAQKGGGFCAYADISLCIHFAFVRLNISRVMIIDLDAHQGNGHEMDFAYDSRVYILDMYNPGIYPLDYEARNYINQKVEVKSGTVTEEYLQKLDEALEVAGHRFNPELVIYNAGTDILEGDPLGRLEISPEGIALRDEKVFRFAREKNIPIVMLTSGGYMKSSAGVIADSIVNLSKKCLIETSGAPKST

SEQ ID NO: 30984 - protein, 381 aa, Glycine max
  Clone ID: TF_GmC129_1.pep
MADAGAEGASSSTVGQIDVFWHEGMLKHDTGNGVFDTGMDPGFLEVLEKHPENSDRVKNLVSILKRGPISPYISWHLGTPAKIPELFSFHTPEYINELVEVDKEGGKQLCGGTFLNPGSWDAALLAAGTTLSAMKHLLNGDGKVSYALVRPPGHHAQPSQADGYCFLNNAGLAVQLALDSGCKKVAVIDIDVHYGNGTAEGFYRSNKVLTISLHMNHGSWGPSHPQSGSVDELGEGEGYGFNLNIPLPNGTGDKGYVHAFNELVVPSIQKFGPDMIVLVLGQDSNAFDPNGRQCLTMEGYREIGRIVHLLAKRHSAGRLLIVQEGGYHVTYSAYCLHATLEGVLNLPMPLLADPIAFYLDDETFSVQVIEAIKNYQKDKVR

SEQ ID NO: 30985 - protein, 254 aa, Glycine max
  unsure (1)..(254): unsure at all Xaa locations
  Clone ID: TF_GmC305_3.pep
NLLNLLIVSSFAELIFSYLLYVTGQRVLYVDIDVHHGDGVEEAFYTTDRVMTVSFHKFGDFFPGTGHVKDIGVGSGKNYAVNVPLNDGMDDESFRSLFRTIIQKVMEVYQPEAVVLQCGADSLSGDRLGCFNLSVRGHADCLRFLRSFNVPLMVLGGGGYTIRNVARCWCYEVCFFLFXLDYNVTWYLFNLLIWLHAFSLFXTAVAVGVEPENKLPYNEYYEYFGPDYTLYVDPSNMXNLNTPKGMEKIRCLYY

SEQ ID NO: 30986 - protein, 196 aa, Glycine max
  unsure (1)..(196): unsure at all Xaa locations
  Clone ID: TF_GmC1634_1.pep
MESGGNSLPSGSDGVKRKVSYFYDPEVGNYYYGQGHPMKPHRIRMTHALLAHYGLLQHMQVLKPTAAKDRDLCKFHADDYVAFLRGITPETQQDQLRQLKRFNVGEDCPVFDGXLYSFCQTYAGGSVWXGLLKLNHGXCDVAINWAGGLHHAKKCEASGFCYVNDIVLAILELLKIHEVSLINSPHYLIDAWLFSF

SEQ ID NO: 30987 - protein, 600 aa, Glycine max
  Clone ID: TF_GmC81_1.pep
MAYAAPPLDPPGIGTNSPSSQKKRVAYFYDSDVGNYAYQSGHLMKPHRIRMAHSLVMNYGLYNKMEIYRAKPASKYEMTQFHTDEYVDFLQRVTPDNEHLLAKECAKHNVGEDCPPFDGVFEFCAISAGGSMEGAARLNRAKCDMAINWAGGLHHAKKNEASGFCYINDIVLAILELLRFHARVLYIDIDVHHGDGVEEAFYTTDRVMCVSLHKYGEFFPGTGDLRDIGIGQGKHYSVNVPLRDGIDDASYKDVFESVTTWAVEFFQPGAIVLQCGADSLSGDRLGAFNLSLAGHANCVNFVKKFNLPTLFLGGGGYTIRNVARAWAYETGQIVGVELSRSMPFTDYYEYYSPDFELDVKPSNMDNRNSAEYLAKIKSFVYTNLRQAQPVPSVQLQDVPRYPVGMSEHIDDMDDRLDDEDADEETSKDQRLTERVEDRMIEDDMDMSGLEDARGVDSGADADHGSPSIVGEGGSGCKVLSSDHDTDQITEPVPSIDPGNDPEPDRTTMMLQEAIRDESNEVSQPTNVEQTVVQRDAPAEHVEIIAQPSIVLESAPMQPEPPIVQCMNRVDSHTLGLSDAAEAVEAMENNHKGGNENIGLS

SEQ ID NO: 30988 - protein, 359 aa, Glycine max
  unsure (1)..(359): unsure at all Xaa locations
  Clone ID: TF_GmC141697_2.pep
MERENENSVNAQRRVGLLYDETMCKHHTPDDEDHPENPNRIRAIWNRLQSAGVLQRCVILEAKEAEDKHLLLVHSINHVNLIKNISSKQFNSRRHKIASKLGSIYFNEGSSEAAYLAAGSAVEVVKRVASRELDSAVAIVRPPGHHAEQQEAMGFCLFNNVAVAARYLLDERRLEGVKKILIVDWDVHHGNGTQKMFWNDSRVLFFSVHRHEFGSFYPANDDGFYTMIGEGAGAGYNINVPWENGRCGDADYFAVWDHILLPVAKEFNPDIIIVSAGFDAAVGDPLGGCRVTPFGYSVLLEXLMNFAEGRIVLILEGGYNLDSIAKSMHACLEVLLEDSLLLDPXEAYPFESTWRVIKA

SEQ ID NO: 30989 - protein, 97 aa, Glycine max
  Clone ID: TF_LIB3242-368-Q1-K1-E12.pep
NVPLDDGIDDKSYHFLFKPIIGKIMEVFRPGAVVLQCGGDYLFGDRLGCFNLSIRGHAECVKYMRSFNVPLLILGGGGYTIRNVARCWCYEVECCFN

SEQ ID NO: 30990 - protein, 87 aa, Glycine max
  unsure (1)..(87): unsure at all Xaa locations
  Clone ID: TF_15812308.pep
QSVTTLAPVYLCSPLDYLSVVALELAVNAPPDTEKNKNIPRHALLLATIDLEMLKXLASVIIAHDGVLSNIKPALLTNKTETSSKEL

SEQ ID NO: 30991 - protein, 56 aa, Glycine max
  Clone ID: TF_LIB3039-034-Q1-E1-H5.pep
MARTKQTARRSGGGKAHRKHLATKAARKSAPTSGGVKKPHRYRPESVALRDIRKYQ

SEQ ID NO: 30992 - protein, 68 aa, Glycine max
  unsure (1)..(68): unsure at all Xaa locations
  Clone ID: TF_LIB3040-010-Q1-E1-B10.pep
RKALRASKITAANSDKATDSNKPNSRSSRAEIQFPVGRIHRQLRQMVQSNXHVEATAALYLASTLEYL

SEQ ID NO: 30993 - protein, 111 aa, Glycine max
  unsure (1)..(111): unsure at all Xaa locations
  Clone ID: TF_LIB3107-078-Q1-K1-F5.pep
MVTSKRTALYSTGXGKLPRSSLKPRMYSGTAPTTDGVNKPHRYWPRSVALCEIQKEQRSTVLLIRKLSFQRMIRVIAHNMKTDLRFQSHAVLALQXEAXEAYLGELFEDTN

SEQ ID NO: 30994 - protein, 62 aa, Glycine max
  unsure (1)..(62): unsure at all Xaa locations
  Clone ID: TF_LIB3170-033-Q1-K1-F2.pep
MARSKHTACKSTGGNAPRXQLATWAERXSARTTAGVKKPHRYRPITVALREITKYQNSTELL

SEQ ID NO: 30995 - protein, 80 aa, Glycine max
  unsure (1)..(80): unsure at all Xaa locations
  Clone ID: TF_LIB3039-023-Q1-E1-D9.pep
NAPKKQLASKASPKXAPATFGVYNRHSFRPLTVALTEILQXQHSTNPLMTKLPYQTLVKXIAQDIKTHHSFQSNAMSDLH

SEQ ID NO: 30996 - protein, 75 aa, Glycine max
  unsure (1)..(75): unsure at all Xaa locations
  Clone ID: TF_700988871H1.pep
MARTKQTARKSXTGGKAPRKQLXTKAARKXSAPTTXGXXKPXRYRPGTVALRXIRKSQKSXELLIRKLPFQRXVR

SEQ ID NO: 30997 - protein, 87 aa, Glycine max
  unsure (1)..(87): unsure at all Xaa locations
  Clone ID: TF_jC-gmX3042004B07sg10K4b1.pep
MARAKQTXRKYTGGKAPTKQLAXTKAARKSAPTTGGVKKPYRYRTVTVALREIRKYQKRTXLLHRRHPSCALDMQTLQDYQTELWRQ

SEQ ID NO: 30998 - protein, 86 aa, Glycine max
  Clone ID: TF_LIB3167-080-P1-K1-D7.pep
GPGFRKQPQLARPKQTVRKSTGGKAPRKQLAPKVERRFEPTTGGVKKPNRFGPGPVVFVEFRNSQKSPELLFRKLPFQRLFRELVK

SEQ ID NO: 30999 - protein, 77 aa, Glycine max
  unsure (1)..(77): unsure at all Xaa locations
  Clone ID: TF_jC-gmXLIB3564P090de03a1.pep
KLPLYRLVRQIAQDFKSLFSFQKQSCVXALQEAVKAYIVGLVKNTSLSTIHAKRVTIMAKDIQLASRVRVTSPYKQG

SEQ ID NO: 31000 - protein, 83 aa, Glycine max
  Clone ID: TF_jC-gmle01810084c01a1.pep
MARTQASSAAQRGRPSTGGKGRPSDAGKSRPSESGKEVTKAPRRSSGGKTPASPGTRKKPRYKPGTVALREIRRYQKSTDLLL

SEQ ID NO: 31001 - protein, 60 aa, Glycine max
  unsure (1)..(60): unsure at all Xaa locations
  Clone ID: TF_13790103.pep
MDAGGKIKKGAGGRKGGGPKKKPVSRSVKAGLQFPVGRIGPYLKKGRXPQRVGPGPPYTG

SEQ ID NO: 31002 - protein, 39 aa, Glycine max
  Clone ID: TF_jC-gmfl02220103c09a1.pep
ARDLVGLFEVSFYCAIHAYRVTVVPKDIQLARRILGERA

SEQ ID NO: 31003 - protein, 90 aa, Glycine max
  unsure (1)..(90): unsure at all Xaa locations
  Clone ID: TF_uC-gmflLIB3260P045a12b1.pep
GPARNTGPKTRAENAAAKVLELVENAQTDNKRTRKGPRHKQVADRNHQEASKLMGAGTIAXNGGGAPNIDQNSPPNKGAGNGKTDIGTAT

SEQ ID NO: 31004 - protein, 57 aa, Glycine max
  Clone ID: TF_5688045.pep
DAGGRIKKGAGGVKGGGPQKKPGSRPVIAGLQFPVGRFGRYLSEGRLAQRVATGLPI

SEQ ID NO: 31005 - protein, 89 aa, Glycine max
  unsure (1)..(89): unsure at all Xaa locations
  Clone ID: TF_LIB3040-017-Q1-E1-C5.pep
MAPKADRKPVXKKPVEENKSTVGYKAPADIKSAAGEKLPKEGGAGGECMKNKRNKNSVETYXSXIGNVQKHVHTDIGISTKAMGIISRF

SEQ ID NO: 31006 - protein, 86 aa, Glycine max
  Clone ID: TF_uC-gmropic007g05b1.pep
MPGGKGKSSGGKSSGGKTSAAEGTKKQQSHSARAGLQFPCGRVKRFLKQNTQQKMRVGAKAAVYVTAGLEYLTAQVLELAGNAAKD

SEQ ID NO: 31007 - protein, 102 aa, Glycine max
  unsure (1)..(102): unsure at all Xaa locations
  Clone ID: TF_LIB3049-043-Q1-E1-G8.pep
IAYHEAFATCTLNFLTQASFKARTNEAVRKSTGGNDPRKHITTMAGVNSVSTTDXVKTTHHYLLATVALREIMGYQNSTELRMRKLDFQRPVREIAQEVRTD

SEQ ID NO: 31008 - protein, 102 aa, Glycine max
  unsure (1)..(102): unsure at all Xaa locations
  Clone ID: TF_uC-gmroLIB3258P119f12b1.pep
MSTKFVTIVWTNCRWSEEYTLGCIDSVALSETANYQRMTELLMLNLLLHMLNWEVAHELKTXDLCSQIHAVLAWXEAAEVYLVGLFEDTNLCAIHAKRETNY

SEQ ID NO: 31009 - protein, 74 aa, Glycine max
  unsure (1)..(74): unsure at all Xaa locations
  Clone ID: TF_701136208H1.pep
MAGKGGKGFLAEKTREAKKDKDKVKKRPVSGXSRAGIHFPGGRIHRHLNQRVQPNGLLGATAAVNLAPILEYLT

SEQ ID NO: 31010 - protein, 45 aa, Glycine max
  Clone ID: TF_GmC411_4.pep
HASELSKLLGDVTIANGGVMPNIHNLLLPKKAGGSSKGAAADDDS

SEQ ID NO: 31011 - protein, 39 aa, Glycine max
  Clone ID: TF_LIB3049-056-Q1-E1-C3.pep
KLVRESAHDFNTDLRFQSHAVLALLEPAEAYLVGLFEGH

SEQ ID NO: 31012 - protein, 97 aa, Glycine max
  unsure (1)..(97): unsure at all Xaa locations
  Clone ID: TF_LIB3242-257-Q1-J1-B9.pep
MSILSLSNHTRLDSIHKGATLNQLSTNTFLKSSPSTALVKKPHMFMPXTVALMDIKKYHNSTELLIQKLPFQRFFHEIAQDFITHLSFHNITLFFLQ

SEQ ID NO: 31013 - protein, 134 aa, Glycine max
  unsure (1)..(134): unsure at all Xaa locations
  Clone ID: TF_LIB5068-070-A1-XP1-E5.pep
EIRHRTKLTASKCTDXKAARKQLPNKVDRESTTATGGEKETRRLMPKRMTLXRDIQTCHKMTELPIRKLTFXRIAREIAQDCXTDLRCQRSADSVLEEAVEVNLGEIIEDTTHCAILAKRGTTMSKDMPLDRIV

SEQ ID NO: 31014 - protein, 42 aa, Glycine max
  Clone ID: TF_jC-gmro02910047e01d1.pep
KKIAQDIFNLADYKKRPPLSSREIYPRVRIFFPGELAKNPVF

SEQ ID NO: 31015 - protein, 141 aa, Glycine max
  unsure (1)..(141): unsure at all Xaa locations
  Clone ID: TF_LIB4202-003-Q1-K1-F3.pep
MVAGCRKGGGLKNTPVXRYTKAMLQFPVGRIGRCXNKGRSAHRVGTGASEYLGGDIEYLAAQVLEWAGNAARDNXNNRIIPRHXLLALRNNEXLGKWVAGMTIAHGGVLTNMNSVLLPKKTDRACKEPKCTSKATKSPKKA

SEQ ID NO: 31016 - protein, 61 aa, Glycine max
  unsure (1)..(61): unsure at all Xaa locations
  Clone ID: TF_LIB3170-005-Q1-K1-C11.pep
KTHAXKKGGKKKKKRAPKEETGFKVASKPVSNYPVGRIIRYFKKRRCSHRVGTAAPVYLAA

SEQ ID NO: 31017 - protein, 60 aa, Glycine max
  unsure (1)..(60): unsure at all Xaa locations
  Clone ID: TF_jC-gmfl02220064c06a1.pep
VSHAEVLELARNASKDMKSIRKTPRRXQQTICLKEELETLIKGSIAGVGQYLGIHKSMIY

SEQ ID NO: 31018 - protein, 53 aa, Glycine max
  Clone ID: TF_LIB4367-023-R1-K1-D7.pep
WATQDLTPCTKHSCHLGHPSYLDGCTLRVTRIADRPLGEATDPIYPDWHRLTH

SEQ ID NO: 31019 - protein, 77 aa, Glycine max
  Clone ID: TF_10845002.pep
CLSNQTAWMSTPGKAPHKQLATKADRKSAPATGGVNKQHKFRPETVALLEIQNIQRSTATLMAKLPENQSITEIELE

SEQ ID NO: 31020 - protein, 64 aa, Glycine max
  unsure (1)..(64): unsure at all Xaa locations
  Clone ID: TF_jC-gmXLIB3563P053bb05d2.pep
PPPLGFSNKALGIMTSFFHAIFEKVAPEFFKIGRSNKKPPLPSREIXPPVRVFLPGEMAKPPVF

SEQ ID NO: 31021 - protein, 40 aa, Glycine max
  Clone ID: TF_LIB3242-722-P1-K1-G12.pep
EGGAVGEGMKKKRNMMSVVTYKIYIFKVLKQAHLDIGILG

SEQ ID NO: 31022 - protein, 81 aa, Glycine max
  Clone ID: TF_GmC1625_2.pep
MQVLELAGNAARDNKKNRINPRHVLLAVRNDDELGKLLQGVTIASGGVLPNINPVLLPKKSTTAPSEKSSTPKSPKSPKKK

SEQ ID NO: 31023 - protein, 143 aa, Glycine max
  Clone ID: TF_LIB4204-007-R1-N1-H9.pep
PPKRGPQLKFPPNFPPTIPARGKGGKGLGKGAVKRPRKVLRPPIQGLRTPPIRRLPRRGRVKRTSGLISEEPRGVLKIFLDPLIPDPVPPPEHARRKPVPPMDVVYALKSQGSPLYAFWRLKNRIFRFNACVAASPIGSFEFA

SEQ ID NO: 31024 - protein, 119 aa, Glycine max
  Clone ID: TF_LIB3040-009-Q1-E1-E8.pep
QQSNFQTQLQFNNQTSPWFPIQKEVALPSQTAHNSTGGRAPGTQLETKAAHMSARDTGGVKKPQRFRPETVALRDIRLYQKSTDLLMRKLPFQRLVRKIAQDFKTYLRFQSSAVSALQE

SEQ ID NO: 31025 - protein, 93 aa, Glycine max
  unsure (1)..(93): unsure at all Xaa locations
  Clone ID: TF_16282480.pep
GVGKERSKEHRKVFCYNIQGITKPPIGRLVPKGGVKKISGLIYXKTRGVLKIFLENVIRNAVTYTEPAKRKTVPAMDVVYALKRKGRTFYGFG

SEQ ID NO: 31026 - protein, 143 aa, Glycine max
  unsure (1)..(143): unsure at all Xaa locations
  Clone ID: TF_jC-gmXLIB3563P053bb05d3.pep
PGKKAPGGEKVPGGDKGPAGKKPKAGKKLPKKGGPPGKGKKKKRPPKGGGATQIFFFKVLKGGPPPLGFSSRALGFINSFFKDIFEKVAPGFFKIARSTKKPPPPSRGIXPPVRVFLPGELAQPPVFWGAKGVPQFPRFWTGY

SEQ ID NO: 31027 - protein, 99 aa, Glycine max
  unsure (1)..(99): unsure at all Xaa locations
  Clone ID: TF_LIB3039-047-Q1-E1-H1.pep
SILEQEEKHEKTVEKNHVEKVXRKSQAGKKLPXRKTRRKKGEEEKRNKKSVETYKIYIFKVLKQVNPDIGISSKGMGIMNSFINDIFEKLAQESFRLAR

SEQ ID NO: 31028 - protein, 67 aa, Glycine max
  Clone ID: TF_GmC40_15.pep
NSARGIAQDFKTDLRFQSHAVLALQEAAEAYLVGLFEDTNLCAIHAKRVTIMPKDIQLARRIRGERA

SEQ ID NO: 31029 - protein, 116 aa, Glycine max
  Clone ID: TF_LIB3170-009-Q2-K1-H1.pep
ILWILFFKIHTARTKRTARKCTRGKASLKQLATKGERKSVPTTVGVKNPHRYQTGTAALSEIKKYQKSTELLIHKLPLQRMNREIAHDFKTDMLFQSHPTLAFQEADEAYLIRLFD

SEQ ID NO: 31030 - protein, 83 aa, Glycine max
  Clone ID: TF_LIB3049-016-Q1-E1-F3.pep
MARTHPSARMSTGRKAPRKQLATKAARKSAPTTGGVKKPHRYRPGTVALREIRKYQKSTELLIMKLPFQMLVREIAQDFKTDL

SEQ ID NO: 31031 - protein, 140 aa, Glycine max
  unsure (1)..(140): unsure at all Xaa locations
  Clone ID: TF_LIB3092-022-Q1-K1-E10.pep
FLNKCFLVFTRNTSRRPAQFKRAHNSTXLKSPHKHLATNSARNSAPTTDGVNNPYLYLPVTFALLEIIKYHKSTDLLITNLPFHTFLPQIAQNFKTDLLFQIHAILSLQYASXAYLVFLFYDTNFVSIHPKRFTIIPNDI

SEQ ID NO: 31032 - protein, 120 aa, Glycine max
  unsure (1)..(120): unsure at all Xaa locations
  Clone ID: TF_12015491.pep
APKAEKKPVEEKKSTVGDKAPAEKKPXAGMKLLKEGGAGGEGKNMKRIMNSVETYKIYIFNDMKQVHPDIGIXSRAMGVMNMFINNIYLKLVSKSYLLARYVXRLIITCREVETAVKLEL

SEQ ID NO: 31033 - protein, 104 aa, Glycine max
  unsure (1)..(104): unsure at all Xaa locations
  Clone ID: TF_LIB4367-010-R1-N1-C7.pep
PIAAGEKGGRRKRGKKSVETYKIYIXKVXKXHPELVXKQAMGXMNSYQDIXEKVVRNVQTCRYNKKPTIXXREXQTGVRLVLXGELXKHAVXEGTKGVXKLNSC

SEQ ID NO: 31034 - protein, 79 aa, Glycine max
  unsure (1)..(79): unsure at all Xaa locations
  Clone ID: TF_uC-gmflLIB3260P039c07a1.pep
KQGPPALGISNKALGIINSFIKAIFXKLVQEFFKFARFNKKPPLPSREIHTPVRIFLPGELAKHPVFXGTKAVPKFTRF

SEQ ID NO: 31035 - protein, 129 aa, Glycine max
  Clone ID: TF_GmC1341_4.pep
MWLSCSTMKPYKADEETFESSHEAFKSAFPRGFAWEVIKVYSGPPEIAFKFRHWGFFEGPFKGHAPTGKMAQFYGLGTVKVDDSLKVEEVEIYYDPAELLGGLLSGNHEARDSASGATWWREAYQWSHL

SEQ ID NO: 31036 - protein, 115 aa, Glycine max
  unsure (1)..(115): unsure at all Xaa locations
  Clone ID: TF_7233625.pep
RNTENGKNSDAEKKPIWKAGRSNLELRVQRIAGVGRRRNTLTYRTKAPIYLATLLKYVATGRRELTXNTTRDNRKDGIIPRHVLLARRSDEEWEKVLTGVTRTHGNGLANISPVV

SEQ ID NO: 31037 - protein, 114 aa, Glycine max
  unsure (1)..(114): unsure at all Xaa locations
  Clone ID: TF_LIB3242-704-P1-K1-A9.pep
MARTKQTARKITGGKAAKKQLSTKAERKSAPTTGGVKKPDRYRPGTDALREIRKYQKSTELLIRKLPFQRVVQEIXAQDFKTDLRXQSHAVLALQEAADAYLDGLYEDTNLCAI

SEQ ID NO: 31038 - protein, 129 aa, Glycine max
  Clone ID: TF_LIB3170-032-Q1-K1-A8.pep
DYIFFFLCILFIQGSGGFFWKRPKYFKIARTKQTAPKSTAGKAPIKHLTTNAARKSAPTTADVNNPHRYRPETVALHEIMKYQNSTELLIKKLSFHKLNPEIAQDFKTDLRLQSHAVLALQEAYEAYLF

SEQ ID NO: 31039 - protein, 80 aa, Glycine max
  Clone ID: TF_LIB4204-012-R1-N1-E12.pep
QTACKSPGGKAPRKQLATKTVFKLAPGTGGVKKPPRFRPGTVVFRGFLKFPKSPELFFRKLPFQRFVKEIVQVFKTVFRF

SEQ ID NO: 31040 - protein, 122 aa, Glycine max
  unsure (1)..(122): unsure at all Xaa locations
  Clone ID: TF_LIB3049-054-Q1-E1-D7.pep
MHIHYLFSKSLIVLKAPVMEEKKPAENKPASENVTVEKNPNADNKISTEGRSXKYTMRTMKSVETYKMYILKVLKQVQPDIGISISAMGSMNSFINDLLYNLALEALRLARFDMNPKITSRE

SEQ ID NO: 31041 - protein, 107 aa, Glycine max
  unsure (1)..(107): unsure at all Xaa locations
  Clone ID: TF_jC-gmX3040038G02sg9C1b1.pep
HTNRKCTRGKAPLKQLEPKAGRLCVPTTGGVTKPTLYRTGTSAVQWSKTYHKSAELLIRPLPFQRLDREIGXDCXTDLRIQSRTELALQEAPYAYLDGLCVDTNLCA

SEQ ID NO: 31042 - protein, 134 aa, Glycine max
  unsure (1)..(134): unsure at all Xaa locations
  Clone ID: TF_uC-gmflLIB3275P077d12b1.pep
SRSKRTPTTRTFGEAPTNTVATKTDRKSXPATVGLNKPXRFKPGTVGLEDIRQCLKSTELLILELPFRMLFTKINHDFKTYLQFQSTDVSDLEETADDYLYGLLNDTKLCDIYAKRVTIMPKDMKLARRIISDR

SEQ ID NO: 31043 - protein, 103 aa, Glycine max
  unsure (1)..(103): unsure at all Xaa locations
  Clone ID: TF_LIB3040-041-Q1-E1-E10.pep
MARFKHNALKSTRGYAXTKQLATEAARISATATGGVKTPHRYHPVNVALRVIKLYLKITDLLMRNLSFQXLVLEIAHDVTTDMRFXSHAVLALQGTAVAFLVR

SEQ ID NO: 31044 - protein, 122 aa, Glycine max
  unsure (1)..(122): unsure at all Xaa locations
  Clone ID: TF_LIB3040-010-Q1-E1-F10.pep
MSEHSTSVPLRKHNQKLLTKSQIFLGAPAKAEKKPAEKKPAEEKAPAENKPNADTKISNERGSDKNKNRTMKSVETXMIYIFKVLKHVHPDIGISSRAMGIMNSFINDIFEKLAQDASRWAR

SEQ ID NO: 31045 - protein, 89 aa, Glycine max
  Clone ID: TF_jC-gmle01810041e09d1.pep
LNQRVQPNGRVGATAAVFLASILENLTSKVLNLAGNLTKIFKVKRIPPRPLQLAIRGDEKLSPLIKGPLPGGGVIPPIPKPLINKVAKK

SEQ ID NO: 31046 - protein, 94 aa, Glycine max
  unsure (1)..(94): unsure at all Xaa locations
  Clone ID: TF_LIB3065-016-Q1-N1-E12.pep
SCTAFRNQTQIYRTEQSAHKFTGXKAPTKHLATKAARKSAPTTGVVNKPHRIRPGTVALREIRKYHKSTELLIRKLPFHRLIREIAHDFKTDLH

SEQ ID NO: 31047 - protein, 97 aa, Glycine max
  Clone ID: TF_LIB3039-046-Q1-E1-C12.pep
MSGRGKGGKGLGKGGATRHRKVLRDNIHGITKPAIRRLARMGGVKRISGLIYEETRGVLKMTEGGAQVSLLIEISRTSVMNMNVPVIFVATNLVAWQ

SEQ ID NO: 31048 - protein, 97 aa, Glycine max
  unsure (1)..(97): unsure at all Xaa locations
  Clone ID: TF_LIB3049-054-Q1-E1-A10.pep
MARTKQTARKSTGRKAPXKQLANKAARKSAPTTGGVKKPHRYRPGTVALREIXKYQKSTELLIRKLPFQKLVREIAQDFKTDLRFQSHAVLALQEAA

SEQ ID NO: 31049 - protein, 80 aa, Glycine max
  Clone ID: TF_LIB3242-095-Q1-J1-E12.pep
RSTQLLIRKLPLHRLVREIDQDLNTDLRYQSHAVLALQEAADAYLAGLFEDTNLCAMHAKRVTIMPKDIQLARRILGERA

SEQ ID NO: 31050 - protein, 116 aa, Glycine max
  unsure (1)..(116): unsure at all Xaa locations
  Clone ID: TF_LIB3170-017-Q1-K1-H8.pep
MEAPPKGAAIRRGDRNKSGSKYINAGVQFHLCRVVSYXKKGRLCCRLGTGATIYLPAVLEYVVAEKQKLAGNAARDNQKNKINPLHMLLAERNDHELWKLLLGVTIDSGGMKPNIN

SEQ ID NO: 31051 - protein, 124 aa, Glycine max
  unsure (1)..(124): unsure at all Xaa locations
  Clone ID: TF_LIB3106-096-Q1-K1-A12.pep
MARTKQTARKSTAGTAPKKQLASXAARKSAPATAGVKKPHRYGSXTSATRETMKYQNSTELLITKLALQRLVREYCHYFKTDLRXQSHAELALQEADEAXPYELXEDTNSCAIHAKRVTIMPKD

SEQ ID NO: 31052 - protein, 123 aa, Glycine max
  unsure (1)..(123): unsure at all Xaa locations
  Clone ID: TF_jC-gmXLIB3563P075bc11a2.pep
MARTKQTARKSTGXGKAPRKQLATKAARKSAPTTGGVKKPHRYRPGTVALREIRKYQKSTELLIRKLPFQRLVREIAQDFETDLRFQSHAVLALQEAAEAYLVGLFEDTNLCAIYAKRVNIIP

SEQ ID NO: 31053 - protein, 92 aa, Glycine max
  unsure (1)..(92): unsure at all Xaa locations
  Clone ID: TF_6725068.pep
GAVKKFYCYSSGTVVLREIRKYXKSIELLIRKLPFXRLVREIAXDFKIDLRFQSHXVIAXXEAVEAYLVGLFEDINLCAIYVKRVIIMLKDI

SEQ ID NO: 31054 - protein, 148 aa, Glycine max
  unsure (1)..(148): unsure at all Xaa locations
  Clone ID: TF_GmC45_9.pep
MDAGGKIKKGAGGRKGGGPKKKPVSRSVKAGLQFPVGRIGRYLKKGRYAQRVGTAAPVYLAAVLEYLAAEVLELAGNARDNKKXRSIPRHVLLAVRNDEELGKLLAGVTIAHGGVLPNINPVLLPKKTERAAKEPKSPSKGTKSPKKA

SEQ ID NO: 31055 - protein, 136 aa, Glycine max
  Clone ID: TF_uC-gmflminsoy091f03b1.pep
MARTKQTARKSTGGKAPRKQLATKAARKSAPTTGGVKKPHRYRPGTVALREIRKYQKSTELLIRKLSFQRLVREIAQDFKTDLRFQSHAVLALQEAAEAYLVGLYEDTNLCAIHAKRVTIMPKDIQLARRIRGERA

SEQ ID NO: 31056 - protein, 136 aa, Glycine max; identical to SEQ ID NO: 6888
  Clone ID: TF_GmC1224_1.pep

SEQ ID NO: 31057 - protein, 136 aa, Glycine max; identical to SEQ ID NO: 6888
  Clone ID: TF_GmC127_1.pep

SEQ ID NO: 31058 - protein, 136 aa, Glycine max; identical to SEQ ID NO: 6888
  Clone ID: TF_GmC127_2.pep

SEQ ID NO: 31059 - protein, 136 aa, Glycine max; identical to SEQ ID NO: 6888
  Clone ID: TF_GmC1607_1.pep

SEQ ID NO: 31060 - protein, 136 aa, Glycine max; identical to SEQ ID NO: 6888
  Clone ID: TF_GmC1638_1.pep

SEQ ID NO: 31061 - protein, 192 aa, Glycine max
  Clone ID: TF_GmC1655_1.pep
MARTKQTARKSTGGKAPRKQLRHQGSTQVRDITLSLLQSQLIAFFFFQRESVFVFQMARTKQTARKSTGGKAPRKQLATKAARKSAPATGGVKKPHRFRPGTVALREIRKYQKSTELLIRKLPFQRLVREIAQDFKTDLRFQSSAVSALQEAAEAYLVGLFEDTNLCAIHAKRVTIMPKDIQLARRIRGERA

SEQ ID NO: 31062 - protein, 136 aa, Glycine max; identical to SEQ ID NO: 6888
  Clone ID: TF_GmC1655_2.pep

SEQ ID NO: 31063 - protein, 136 aa, Glycine max; identical to SEQ ID NO: 6888
  Clone ID: TF_GmC1680_1.pep

SEQ ID NO: 31064 - protein, 136 aa, Glycine max; identical to SEQ ID NO: 6888
  Clone ID: TF_GmC1680_2.pep

SEQ ID NO: 31065 - protein, 175 aa, Glycine max
  Clone ID: TF_GmC578_1.pep
MARTKQTARKSTGGIAKSFLQFNHHCTTQFPSSFSIKRAMARTKQTARKSTGGKAPRKQLATKAARKSAPATGGVKKPHRFRPGTVALREIRKYQKSTELLIRKLPFQRLVREIAQDFKTDLRFQSSAVSALQEAAEAYLVGLFEDTNLCAIHAKRVTIMPKDIQLARRIRGERA

SEQ ID NO: 31066 - protein, 136 aa, Glycine max; identical to SEQ ID NO: 6888
  Clone ID: TF_GmC578_2.pep

SEQ ID NO: 31067 - protein, 136 aa, Glycine max; identical to SEQ ID NO: 6888
  Clone ID: TF_GmC913_1.pep

SEQ ID NO: 31068 - protein, 137 aa, Glycine max
  Clone ID: TF_GmC1626_1.pep
MAKGEKKPAEKKPAEKAPAEKTKAEKKIPKEPASGEKKKKKRNKKSVETYKIYIFKVLKQVHPDIGISSKAMGIMNSFINDIFEKLAQESSRLARYNKKPTITSREIQTAVRLVLPGELAKHAVSEGTKAVTKFTSS

SEQ ID NO: 31069 - protein, 137 aa, Glycine max; identical to SEQ ID NO: 31068
  Clone ID: TF_GmC1626_2.pep

SEQ ID NO: 31070 - protein, 119 aa, Glycine max
  unsure (1)..(119): unsure at all Xaa locations
  Clone ID: TF_LIB3028-002-Q1-B1-F11.pep
MAPAAEKKPAEKKPAEEKKSTVGDKAPAENKPXAGKKLPKEGGAGGXRKKKKRNMKSVETYKIYIFKVLKQVHPDIGISSNAMGIMNSFINDIFYKLAQESSILARYNKNRNITSREIQ

SEQ ID NO: 31071 - protein, 81 aa, Glycine max
  Clone ID: TF_LIB3054-001-Q1-B1-C7.pep
QKSTELLIRKLPFHRLVREIAQYFKTDLRFQSHAVLALQEAAEAYRVGLFEDTNLCANHAKRVTIMPKDIQLARKIRGERA

SEQ ID NO: 31072 - protein, 106 aa, Glycine max
  Clone ID: TF_LIB5068-035-A1-XP1-G6.pep
MTAGIEKNNIRTINTVDTYEIYIFPVLPKVHPDIGISMNVMFIMNSFINDVFNKLAQHASRLPLYNWKPTITSRDIQTSVRLVLPDELCKLAASECTKESTKITSS

SEQ ID NO: 31073 - protein, 111 aa, Glycine max
  Clone ID: TF_LIB3170-020-Q1-K1-H3.pep
MNLVGERKTITISGIGKGGRGLGKGGAKRHPKGLRDNIQRITKTAIRRLARRGTVKRINGLMYEETRSVLKILLQNVIRDAGTYTEHARRKTENAMDDGYSLQTQDKTLYR

SEQ ID NO: 31074 - protein, 114 aa, Glycine max
  unsure (1)..(114): unsure at all Xaa locations
  Clone ID: TF_jC-gmX3040037G03sg8F24b1.pep
TKGGEQKNQQSGRPKKKPVSRSVKAGLQFPVGRIGRFLKKGRFSQRVGTGAPVYLGAVLESLSAKVLXLAGNASLDNKKNRIFPRPLLFALRNXKXLGKLLAGVPIAQWWLASN

SEQ ID NO: 31075 - protein, 134 aa, Glycine max
  Clone ID: TF_6667484.pep
RTKQTARKCTGGKAPRKQLATKAARKSAPTTGGVKKPHRYRPETEALRERRRYQRTTELLIRKLPFQRLVREIAHDFKTDLRCQSRAVLALQEAAEAYLVGLCDDTNLCAVNAKRVTIMPKDSELAREIPGERA

SEQ ID NO: 31076 - protein, 139 aa, Glycine max
  Clone ID: TF_GmC128_3.pep
MASHDKAQGSSTTKKGISRSNKAGLQFPVGRVARYLKTGKYAERISSAAPVYLASVLEYLAAEVLELAGNAVMDNKKTRIMPRHIQLAVRNDEELNKLLGDVTIANGGVMPNIHSMLLPKKVGTSTSTFMGASVNDNDA

SEQ ID NO: 31077 - protein, 71 aa, Glycine max
  unsure (1)..(71): unsure at all Xaa locations
  Clone ID: TF_LIB3242-505-P1-J1-D11.pep
LELAGNAARVYKKTRIVPRDIQLAVGNDXELSMLLGDVTIANGGVMPNIHNLLLPKKAGGSSKAAAADDDS

SEQ ID NO: 31078 - protein, 315 aa, Glycine max
  unsure (1)..(315): unsure at all Xaa locations
  Clone ID: TF_GmC411_7.pep
SANADSDSFEMELDKDDEMTTLSETGCDTEEQESTSSEELDELAISRDMPHLYPRPHISCNEAVSKWKLKGKRNNRNLVKRSVGAADGKGVVLYEADVEGLRSRLNHKRLVPSMHYYGNGISDVFADTDQMFGFEDEYSPTSKALAKGQNKIGHGVDWDEWAWEDQTAFKGYWENKGFARLYSDSYHFDGRMRSMLVDVDLKVQASYRKAPVPIVSITSKLDGKSIIGHPIQIESLKDGSSDKLFSAIDDXSNDGNGFEGSSVLPPAWRTAXETXTTNVFLVPVSSHLLVLKVMHSSAHISNENLTTSTEHNYQN

SEQ ID NO: 31079 - protein, 118 aa, Glycine max
  Clone ID: TF_LIB4164-023-Q1-K1-A7.pep
EAACTKAARKSAPTTGGVKKPHRYRPGTVALREIRKYQKSTELLIRKLPFQRLVREIAQDFKTDLRFQSHAVLALQEAAEAYLVGLFEDTNLCAIHAKRVTIMPKDIQLARRIRGERA

SEQ ID NO: 31080 - protein, 101 aa, Glycine max
  unsure (1)..(101): unsure at all Xaa locations
  Clone ID: TF_LIB3040-029-Q1-E1-D5.pep
MAPAKAEKKPAEKKPAEKAPAEKKPKAEKKXISREGGSEKKKKRIKNSVETXDIYIIRVXKHVDHDMGISSKAMGDMRSFINDIFEKLAQESSRPARYNKK

SEQ ID NO: 31081 - protein, 117 aa, Glycine max
  unsure (1)..(117): unsure at all Xaa locations
  Clone ID: TF_jC-gmfl02220091h12a1.pep
MARTKQTVRKSTGGKAPKKHLATKAARQTVPTTGGVKKPNSYRPGTVALREIRKYQKSTALLFKKLTFHEVXREIAQDXRTELRQQSHAVLALQEAVEAYLVGLFEDTNLGAINDKR

SEQ ID NO: 31082 - protein, 97 aa, Glycine max
  unsure (1)..(97): unsure at all Xaa locations
  Clone ID: TF_10842835.pep
SGKGAKGLITAKDKYKKKPISRSSTSSLHFPVEHIHHLLKSKVTAHKRVKATTTFYSTTILNYLTTXVLKLTNNASKDLKVNHITPIHLQLTIHKYK

SEQ ID NO: 31083 - protein, 78 aa, Glycine max
  unsure (1)..(78): unsure at all Xaa locations
  Clone ID: TF_LIB4202-005-Q1-K1-B9.pep
MAGGGITLGSNAAKKATXRSRKAGLQFPVXRIGRVLKGGKNTKRVDTEAHKYLDDVVGYVASEVXELGGNAGRDDMKT

SEQ ID NO: 31084 - protein, 143 aa, Glycine max
  unsure (1)..(143): unsure at all Xaa locations
  Clone ID: TF_GmC1660_5.pep
MARTKQTARKSTGGKAPRKQLATKAARKSAPTTGGVKKPHRYRPGTVALREIRKYQKSTELLIRKLPFQRLVREIAQDFKQITDIFXTDLRFQSHAVLALQEAAEAYLVGLFEDTNLCAIHAKRVTIMPKDIQLARRIRGERA

SEQ ID NO: 31085 - protein, 60 aa, Glycine max
  Clone ID: TF_LIB3108-050-Q1-K1-B1.pep
MDAGCKITKGAAGRKGGGPKKKPLSRSVKAGLHIPVGRIGRYLKKGRYSQRVCTGAPVYL

SEQ ID NO: 31086 - protein, 63 aa, Glycine max
  unsure (1)..(63): unsure at all Xaa locations
  Clone ID: TF_700980281H1.pep
QDFKTDLRFQSHAVLALQEAAEAYXVGLFEDTNLCAIHASRVTIMPRYSAGKKVRGDVLSCGR

SEQ ID NO: 31087 - protein, 97 aa, Glycine max
  unsure (1)..(97): unsure at all Xaa locations
  Clone ID: TF_GmC127_3.pep
PRFRPGTVALREIRKYQKSXELLIRKLPFQRLVREIAQDFKTDLRFQSSAVSALQEAAEAYLVGLFEDTNLCAIHAKRVTIMPKDIQLARRIRGERA

SEQ ID NO: 31088 - protein, 171 aa, Glycine max
  unsure (1)..(171): unsure at all Xaa locations
  Clone ID: TF_GmC1230_4.pep
ANSNSQFPIRNPYSFQRTKLSDRDGTKAEKKPAEKKPAEEKKSTVGDKAPAEKKPXAGKKLPKEGGAGGEGKKKKRNKKSVETYKIYIFKVLKQVHPDIGISSKAMGIMNSFINDIFEKLAQESSRLARYNKKPTITSREIQTAVRLVLPGELAKHAVSEGTKAVTKFTSS

SEQ ID NO: 31089 - protein, 144 aa, Glycine max
  Clone ID: TF_GmC110_2.pep
MSSTEVAATTKKGGRGKPKTTKSVSRSSKAGLQFPVGRVARYLKAGRYAQRVGSGSPVYLSAVLEYLAAEVLELAGNAARDNKKTRIVPRHIQLAVRNDEELSKLMGSVTIANGGVLPNIHQNLLPKKAAGKGKPEIGSASQEF

SEQ ID NO: 31090 - protein, 139 aa, Glycine max
  Clone ID: TF_GmC732_1.pep
MAPAKAEKKPAEKKPAAEKAPAEKKPKAEKKISKEGGSEKKKKRTKKSVETYKIYIFKVLKQVHPDIGISSKAMGIMNSFINDIFEKLAQEASRLARYNKKPTITSREIQTAVRLVLPGELAKHAVSEGTKAVTKFTSS

SEQ ID NO: 31091 - protein, 149 aa, Glycine max
  unsure (1)..(149): unsure at all Xaa locations
  Clone ID: TF_GmC45_2.pep
MDAGGKIKKGAGGRKGGGPKKKPVSRSVKAGLQFPVGRIGRYLKKGRYAQRVGTGAPVYLAAVLEYLAAEVLELAGNAARDNKKNRIIPRHVLLAVRNDEELGKLLAGVTIAHGGVLPNINPVLLPKKTERAXKEPKSPSKATKSPKKA

SEQ ID NO: 31092 - protein, 110 aa, Glycine max
  unsure (1)..(110): unsure at all Xaa locations
  Clone ID: TF_LIB3053-009-Q1-N1-B6.pep
MTLTLSIRTASICSWRLTISLNGSIGLITRKTSAAIKDRDXKKPISCTHSAVLQFTAGXIHRLMKSMTAAHDRFWATSAVYYAAILEYLTAEVLHLARNASKDLIVKRIT

SEQ ID NO: 31093 - protein, 85 aa, Glycine max
  unsure (1)..(85): unsure at all Xaa locations
  Clone ID: TF_LIB3039-015-Q1-E1-B9.pep
QRRSYEQLQQCSTESAPATVSVKQPHRXHPASVTLREIRPYHTSTELMIRKLPFQTLVPDITQDFKTDLHFQIHTVLALHEPADA

SEQ ID NO: 31094 - protein, 92 aa, Glycine max
  Clone ID: TF_LIB3051-079-Q1-K1-C3.pep
MARTKQTARKSTGGKAPRKQLATKAARKSAPTTGGVKKPHRYRPGTVALREIRKYQKSTELLIRKLPFQRLVREIAQDFKTDLKFQSHAVLA

SEQ ID NO: 31095 - protein, 62 aa, Glycine max
  unsure (1)..(62): unsure at all Xaa locations
  Clone ID: TF_uC-gmroLIB3259128g02a1.pep
LIFCQQGGIPPRKQLRTXAPRKYVPATGGTTKPKRYLPGTVALRVIRTYQNTTDLLIKKLTL

SEQ ID NO: 31096 - protein, 98 aa, Glycine max
  Clone ID: TF_GmC137292_1.pep
ERFYCCLFEIDVSEITFWASTQMARTKQTARKSTGGKAPRKQLATKAARKSAPTTGGVKKPHRYRPGTVALREIRKYQKSTELLIRKLPFQRLVREIA

SEQ ID NO: 31097 - protein, 122 aa, Glycine max
  Clone ID: TF_GmC1607_2.pep
MARTKQLATKAARKSAPATGGVKKPHRFRPGTVALRGIRKYQKSTELLIRKLPFQRLVREIAQDFKTDLRFQSSAVSALQEAAEAYLVGLFEDTNLCAIHAKRVTIMPKDIQLARRIRGERA

SEQ ID NO: 31098 - protein, 80 aa, Glycine max
  Clone ID: TF_LIB4366-015-R1-K1-C10.pep
EYLAADVLELVPNTVRNNTKTRIVAMHIILVARNHVELSALMGSATIAIGGALANIYHNLMPKKVAVQGKPHTGSASQEI

SEQ ID NO: 31099 - protein, 117 aa, Glycine max
  unsure (1)..(117): unsure at all Xaa locations
  Clone ID: TF_LIB4367-014-R1-K1-H4.pep
RGEGKKKKRNKKSVETYKIYMFKGLKQVHPDIGISSEAMGIMNSFINDIFEKLAQESSRLARYNKKPTITSRERGTAXRLXLPGGGGGGGGGGGGGGGRAGGGGGGGGGGGGGGGGG

SEQ ID NO: 31100 - protein, 123 aa, Glycine max
  unsure (1)..(123): unsure at all Xaa locations
  Clone ID: TF_7589938.pep
PAEKKPKAKKKLPKEGRAGGERGKKKKKNKKSVETYKIYICKVLKQVHPNINISSKAMGIINSFINNIFEXLTQESCRLAHYNKXPTITSKEIQTTIKLMLPGKLTKHXMSKDTETITKWTSS

SEQ ID NO: 31101 - protein, 123 aa, Glycine max
  unsure (1)..(123): unsure at all Xaa locations
  Clone ID: TF_LIB3108-045-Q1-K1-E12.pep
SFEILRTKQTARKGRLXKAPMKQLASNAARKSAPTTGGVKKPHRYRPGTVALREIRKYHKSTELLIRKLPFQRLVREIAHDFKTDLRFQSHSVLALQEAAEAYXVGLFEDTNLCAIHAKRVTI

SEQ ID NO: 31102 - protein, 138 aa, Glycine max
  Clone ID: TF_GmC958271_1.pep
LAVARSKQTARESTGGKAPRKQLATKAAPKSAPSAGGVNKPHRDRPGAVALREIRRYQKSTELLIRKLPFQRLVREIAQDFKTDLRFQSAAIGALQEASEAYLVGLFEDTNLCAIHAKRVTIMPNDIQLARRIRGERA

SEQ ID NO: 31103 - protein, 148 aa, Glycine max
  Clone ID: TF_GmC1230_16.pep
MAPKAEKKPAEKKPAEEKKSTVGDKAPAEKKPKAGKKLPKEGGAGGEGKKKKRNKKSVETYKIYIFKVLKQVHPDIGISSKAMGIMNSFINDIFEKLAQESSRLARYNKKPTITSREIQTAVRLVLPGELAKHAVSEGTKAVTKFTSS

SEQ ID NO: 31104 - protein, 149 aa, Glycine max
  Clone ID: TF_GmC1230_18.pep
MAPKAEKKPAEKKPAEEKKSTVGDKAPAEKKPKAGKKLPKEGGAGGEGGKKKKRNKKSVETYKIYIFKVLKQVHPDIGISSKAMGIMNSFINDIFEKLAQESSRLARYNKKPTITSREIQTAVRLVLPGELAKHAVSEGTKAVTKFTSS

SEQ ID NO: 31105 - protein, 143 aa, Glycine max
  Clone ID: TF_GmC1230_19.pep
MAPKAEKKPAEEKKSTVGDKAPAEKKPKAGKKLPKEGGAGGEGKKKKRNKKSVETYKIYIFKVLKQVHPDIGISSKAMGIMNSFINDIFEKLAQESSRLARYNKKPTITSREIQTAVRLVLPGELAKHAVSEGTKAVTKFTSS

SEQ ID NO: 31106 - protein, 148 aa, Glycine max; identical to SEQ ID NO: 31103
  Clone ID: TF_GmC1230_20.pep

SEQ ID NO: 31107 - protein, 148 aa, Glycine max
  Clone ID: TF_GmC1230_21.pep
MAPKAEKKPAEKKPVEEKKSTVGDKAPAEKKPKAGKKLPKEGGAGGEGKKKKRNKKSVETYKIYIFKVLKQVHPDIGISSKAMGIMNSFINDIFEKLAQESSRLARYNKKPTITSREIQTAVRLVLPGELAKHAVSEGTKAVTKFTSS

SEQ ID NO: 31108 - protein, 149 aa, Glycine max
  Clone ID: TF_GmC1230_24.pep
MAPKAEKKPAEKKPVEEKKSTVGDKAPAEKKPKAGKKLPKEGGAGGEGGKKKKRNKKSVETYKIYIFKVLKQVHPDIGISSKAMGIMNSFINDIFEKLAQESSRLARYNKKPTITSREIQTAVRLVLPGELAKHAVSEGTKAVTKFTSS

SEQ ID NO: 31109 - protein, 148 aa, Glycine max; identical to SEQ ID NO: 31103
  Clone ID: TF_GmC1230_27.pep

SEQ ID NO: 31110 - protein, 149 aa, Glycine max; identical to SEQ ID NO: 31108
  Clone ID: TF_GmC1230_5.pep

SEQ ID NO: 31111 - protein, 110 aa, Glycine max
  unsure (1)..(110): unsure at all Xaa locations
  Clone ID: TF_LIB3093-050-Q1-K1-G7.pep
MARTKHTARMSTXCEAPRKHLATNAARKSAPTTGGVNKPYINPTGTVALHEIRKYHISSELLIRKLLLQRLGREIAHDFKTDLQLQSHAVLXALHEATDAFIVGLNEDTN

SEQ ID NO: 31112 - protein, 91 aa, Glycine max
  Clone ID: TF_700944518H1.pep
QRPKYFEMARTKQTARKSTGGKAPRNQLANNAARKSEPTTGAVKKPHRYRPGTVPLREIRTYQISAVLLIRNLHIQMLVREIAQDFKTDLR

SEQ ID NO: 31113 - protein, 116 aa, Glycine max
  unsure (1)..(116): unsure at all Xaa locations
  Clone ID: TF_LIB3040-006-Q1-E1-A8.pep
DPLYSILQNSCTAFRKHTYIARRNQTARKSTRXKAPMKQLATNAARKSAPTTGDVNKPHRYRPDTVALREIRTYQNSTELLIRKLLFQKLVREIAQDFKTDLRFQSHALLAMQETA

SEQ ID NO: 31114 - protein, 113 aa, Glycine max
  unsure (1)..(113): unsure at all Xaa locations
  Clone ID: TF_LIB4204-003-R1-K1-B3.pep
IISTVPKWTLAERSRTAPEEETALRPKKKPGLRSCIGGLNYPTGXIGHYLKKXKNAQRAQTSAPVYLAAFLEYLNTEELELTGNSXRDNKKNRIIARHVLLAVKNDEELGKLL

SEQ ID NO: 31115 - protein, 97 aa, Glycine max
  Clone ID: TF_LIB3074-039-Q1-K1-H10.pep
MARTKQTARKSTGGKAPMKQLATKAARKSAPTTGGVKKPHRYRPGTVALREIRKYHKNTELLIRKLPFQRLVREIAQDFKTDLPFQNHAVLSFQEAS

SEQ ID NO: 31116 - protein, 158 aa, Glycine max
  unsure (1)..(158): unsure at all Xaa locations
  Clone ID: TF_GmC45_7.pep
MDAGGKIKKGAGGRKGGGPKKKPVSRDSXGSNNKXXPXGFLQFPVGRIGRYLKKGRYAQRVGTGAPVYLAAVLEYLAAEVLELAGNAARDNKKNRIIPRHVLLAVRNDEELGKLLAGVTIAHGGVLPNINPVLLPKKTERAAKEPKSPSKATKSPKKA

SEQ ID NO: 31117 - protein, 77 aa, Glycine max
  unsure (1)..(77): unsure at all Xaa locations
  Clone ID: TF_LIB3106-049-Q1-K1-H12.pep
RKVHIPKKKPFSRSVKAGLQFPVGRIGRYLKKGTYAQRVSTRAPVYLAAVLEXLTADVLELAWNAARDNNKNRIIPR

SEQ ID NO: 31118 - protein, 122 aa, Glycine max
  unsure (1)..(122): unsure at all Xaa locations
  Clone ID: TF_LIB3242-761-P1-J1-F5.pep
MARTKHTARKSTGGKASRKHLATKAARKSAPTTGGVKKPHRYRPGTVALREIXRKYQKSSXLLIRKLSFHRLVREIAQDFKTDLCIQSHAVLALXEAAEAYLDGLFEDTNLCXAIHAKRVTI

SEQ ID NO: 31119 - protein, 109 aa, Glycine max
  unsure (1)..(109): unsure at all Xaa locations
  Clone ID: TF_LIB3073-018-Q1-K1-G7.pep
MAPAKALKKPAENKPAAENAPAEKKPEAANTISKEGWSXKKKKHTKKNLETYKIYIFNVLKQVHRDIGIYSKAMGIMNSFINDIFDKLAQEASRLARYYKMPTITSREI

SEQ ID NO: 31120 - protein, 67 aa, Glycine max
  Clone ID: TF_LIB3049-012-Q1-E1-F3.pep
MGRTKQTARKSTGGKAPRKQLATKAARKSAPTTGGVKKPHRYRPGTVAPREITKYQKSTELLIKKLP

SEQ ID NO: 31121 - protein, 91 aa, Glycine max
  Clone ID: TF_GmC335946_1.pep
LREIRRYQKSTDLLLLKLPFSRLVREVAYNVAPASLEGHRWQSQAIQALQEAAEAFLVHLFEDTNLCALHAKRVTIMQKDIQLARRLRGAL

SEQ ID NO: 31122 - protein, 64 aa, Glycine max
  Clone ID: TF_9205495.pep
REIAHDFKTELRCQSHAVLALQDAAEAYLVGLFEDTNLCAIHSKRVTIMPKDIHLARTIRGERA

SEQ ID NO: 31123 - protein, 134 aa, Glycine max
  unsure (1)..(134): unsure at all Xaa locations
  Clone ID: TF_18734538.pep
RTKQTAXKPTGGKXPRKQQAXKAARKXXPATGGEKKAHRGRPGTAGQRETRKHQKRIFFLNQKQPIKRMDRDKAQESKTDLRFQSKAEPAAQEAAEGYPEGILRRQNIGGIHARRVPIMPKDNQIARRTKGERA

SEQ ID NO: 31124 - protein, 66 aa, Glycine max
  Clone ID: TF_10845090.pep
YKVLIQVHLDIGIFRNAMGYMNSFMTTCLRRSAIGLSICHRYNKKLTISSREILSAVRLVLSVDLC

SEQ ID NO: 31125 - protein, 74 aa, Glycine max
  unsure (1)..(74): unsure at all Xaa locations
  Clone ID: TF_700971521H1.pep
MARTKQTXRKSTXGKXPRKQXATKAARKSAPTTGXVKKPXRYRPGXTVALXEIRXYQKSTELLIRKLPSRGWFN

SEQ ID NO: 31126 - protein, 113 aa, Glycine max
  unsure (1)..(113): unsure at all Xaa locations
  Clone ID: TF_LIB3242-401-P1-J1-B5.pep
MAPPMAEKKPAEKKXAEKAGAEKKPKAXKKISKEGGSEKIKKRTKKSVETYKMYIFKVLKQVHPDIGISSKAMGIMNRSIYDISEKLAQESLRMARYNKNPTINFREIQTAER

SEQ ID NO: 31127 - protein, 114 aa, Glycine max
  Clone ID: TF_GmC136_3.pep
MSGKGAKGLITGKTSAANNKDKDKKKPISRSSRAGLQFPVGRIHRLLKSRTTANGRVGATAAVYSAAILEYLTAEVLELAGNASKDLKVKRITPRHLQLAIRGDEELDTLIKGT

SEQ ID NO: 31128 - protein, 143 aa, Glycine max
  Clone ID: TF_jC-gmfl02220051a07a1.pep
MARTKQTARKSTGGKAPRKQLATKAARKSAPTTGGVKKPHRYRPGTVALREIRKYQKSTELLIRKLPFQRLVREIAQDFKTDLRFQSHAVLALQEAAEAYLVGLFEDTNLCAIHAKRVTIMPKDIQLARRIRGEPCLNWWFGR

SEQ ID NO: 31129 - protein, 144 aa, Glycine max
  Clone ID: TF_GmC1625_1.pep
MEAPPKGAAGRRGDRKKSVSKSIKAGLQFPVSRVARYLKKGRYSRRLGTGAPIYLAAVLEYLAAEVLELAGNAARDNKKNRINPRHVLLAVRNDDELGKLLQGVTIASGGVLPNINPVLLPKKSTTAPSEKSSTPKSPKSPKKK

SEQ ID NO: 31130 - protein, 97 aa, Glycine max
  Clone ID: TF_LIB3167-003-P1-K1-C9.pep
MAKGEKKPAEKKPAAEKAPAEKTKAEKKIPKDAASGEKKKKRTKKSVETYKIYIFKVLKQVHPDIGISSKAMGIMNSFINDIFEKLAQESSRLARYN

SEQ ID NO: 31131 - protein, 107 aa, Glycine max
  unsure (1)..(107): unsure at all Xaa locations
  Clone ID: TF_LIB3028-015-Q1-B1-D2.pep
PFPPHCESLSIAHASAHYSPSDKKPASNGPXEKKPXVXVKVSMERGSQKMKQIIKXTCETYKIHIVKVLKQVHPDIWIFIKAIGIMNNFINDIFEKLSQESSRLARY

SEQ ID NO: 31132 - protein, 113 aa, Glycine max
  unsure (1)..(113): unsure at all Xaa locations
  Clone ID: TF_LIB3051-117-Q1-K1-G3.pep
MAPKAEKKPAXRKPWEEKKSPVEDKVPAEKKPKAGKKLPKEGGAGGEGKTKKRNKKSVETYKIYIFKVLKQVHPDIGISSKAMGIMNSFINDIFEKLAQESSRLCRYNKKPTI

SEQ ID NO: 31133 - protein, 232 aa, Glycine max
  unsure (1)..(232): unsure at all Xaa locations
  Clone ID: TF_GmC45_6.pep
VCFINEKKPWKPRENTKMVMMKLKTGIHQENKMLCKHHNMHIYERKERRVKVKSHNEELTAKRRCSRSREREDRRSPSFSPREQKRTYQDGERKELSMHSLKDSSRTKNPDIDRNRVSTNGSSGHHHRHGVSTSGLGGYSPRKRKSEAAAKTPSPSKHSLEKKRAGWDLPPAGTNNPSAVVSSSFPVSNCAVLSNMHDVVSTSSLDLALVKPLPVSFPSDVSTGKNTXTLIL

SEQ ID NO: 31134 - protein, 111 aa, Glycine max
  unsure (1)..(111): unsure at all Xaa locations
  Clone ID: TF_LIB3242-241-Q1-J1-F9.pep
KAPKKHLATRSXHVKSAPTTGGVKKPHRYRSVTVALREIRKYQKSPELLIRKLPLQRLVREITQDFNTDLRLQIHPGLALLEAADAYLVGLFEDTHLCAIHAKRVTIMPND

SEQ ID NO: 31135 - protein, 127 aa, Glycine max
  unsure (1)..(127): unsure at all Xaa locations
  Clone ID: TF_12489081.pep
DAGGKIKKGAGGRKGGGPKKKPVSRSVKAGLQFPVGRIGRYLKKGRYAQRVCTGAPGYLGADIEYLSARVLXFAWNAARDNNKNKIIPKHVLLAVRYHDELRKXLAGVTIAPCGVLRNINPVVCLKR

SEQ ID NO: 31136 - protein, 75 aa, Glycine max
  Clone ID: TF_jC-gmX3049027C02sg12M8b1.pep
PFEMARSKQTARKSTGGKAPRKQLATKAGRKSAPTTGGVKNPHRYRSGTVALPVIRNYQKSTVPLIRKLPFQRLV

SEQ ID NO: 31137 - protein, 136 aa, Glycine max
  Clone ID: TF_19937397.pep
KPIDDNNSTVGDNAPAEKNPKGGKKLPKDGGARRQRNNKNRNPTIVKTYKIYIYNVLNHAHPDIGISSKDMGIMNSFINDIFEKLAQESSRLVRYNKKPTITSREIQTAVKLVLNGELSNHVDSDATNARYQLTSS

SEQ ID NO: 31138 - protein, 113 aa, Glycine max
  unsure (1)..(113): unsure at all Xaa locations
  Clone ID: TF_LIB3170-028-Q1-K1-H7.pep
MARTKQTARKSTGGKAPRKQLATKAARKSAPTTGGVKKPHRYRPGTVALREIRKYQKSTELLIRKAPLQRAVREXAXDLRLICVSEHAVLALQSCEHTLWLLRHTCVHHACTI

SEQ ID NO: 31139 - protein, 60 aa, Glycine max
  Clone ID: TF_LIB3242-723-P1-J1-D10.pep
QPYPLKKKKESEQQKHHPQQPIFIFIFTTTTLSTLTANPSCQLDILGHNGYPLSVNGTQV

SEQ ID NO: 31140 - protein, 140 aa, Glycine max
  Clone ID: TF_GmC1624_3.pep
MSSTGGSTKGGRGKPKASKSVSRSQKAGLQFPVGRIARFLKAGKYAERVGAGAPVYLSAVLEYLAAEVLELAGNAARDNKKNRIVPRHIQLAVRNDEELSKLLGSVTIANGGVLPNIHQTLLPKKAGKGKGEIGSASQEF

SEQ ID NO: 31141 - protein, 136 aa, Glycine max; identical to SEQ ID NO: 6802
  Clone ID: TF_GmC1660_4.pep

SEQ ID NO: 31142 - protein, 207 aa, Glycine max
  Clone ID: TF_GmC1341_1.pep
MVKHNNVIPNGHFRKHWQNYVKTWFNQPARKTRRRLARQKKAVKIFPRPTAGSLRPIVHGQTLKYNMKVRAGRGFSLEELKAAGIPKKLAPTIGISVDHRRKNRSLESLQANVQRLKTYKAKLVVFPRRAHKVKAGDSSLEELANATQVQGPFLPIVREKPTVDLVKVTDEMKAFKAYYKLRLERTNKRHHGARLKKAAEAEKEDKK

SEQ ID NO: 31143 - protein, 136 aa, Glycine max
  unsure (1)..(136): unsure at all Xaa locations
  Clone ID: TF_7692361.pep
MARTKQTARKSTGGKAPRKQLATKAARKSAPTTGGVKKPHRYRPGTVALREIRKYQKSTELLIQKLPFQKLIREITQDFKTNLHFQSHAILTLTKXTKAYLIKLFKNTNLFTIHAKHITIMPKNIQLTRRIRSKHT

SEQ ID NO: 31144 - protein, 127 aa, Glycine max
  Clone ID: TF_GmC732_6.pep
MAPAKAEKKPAEKKPAEKKISKEGGSEKKKKRTKKSVETYKIYIFKVLKQVHPDIGISSKAMGIMNSFINDIFEKLAQESSRLARYNKKPTITSREIQTAVRLVLPGELAKHAVSEGTKAVTKFTSS

SEQ ID NO: 31145 - protein, 66 aa, Glycine max
  Clone ID: TF_LIB3040-021-Q1-E1-C2-F1A.pep
NAARDNKKTRIMPSHIQLALRNDEGVSKLLGDVTIANGGVRPNNHNLLLPKKAGGSSKAAAADDDS

SEQ ID NO: 31146 - protein, 134 aa, Glycine max
  unsure (1)..(134): unsure at all Xaa locations
  Clone ID: TF_9900962.pep
RTKQTDRESTGGKARRKLLATKGALKSAPSTGGVNKPHRCRPGSGALRXIEIYQRSTGRWIRKLPLQRLVWEIAQDCKTDLNVHSHAVLRLHEACDAYLGGLLEDTNVWAMRAXRVSVMPIDMHVARWILGERA

SEQ ID NO: 31147 - protein, 134 aa, Glycine max
  Clone ID: TF_GmC120_1.pep
MAKAAEKKPAAEKAPAEKKPKAEKKVPKEGSGGEKKKKRSKKSVETYKIYIFKVLKQVHPDIGISSKAMGIMNSFINDIFEKLAQEAARLARYNKKPTITSREIQTAVRLVLPGELAKHAVSEGTKAVTKFTSS

SEQ ID NO: 31148 - protein, 134 aa, Glycine max; identical to SEQ ID NO: 31147
  Clone ID: TF_jC-gmXLIB3563P040dh07a2.pep

SEQ ID NO: 31149 - protein, 149 aa, Glycine max
  unsure (1)..(149): unsure at all Xaa locations
  Clone ID: TF_GmC45_4.pep
MDTGGKIKKGAGXRKGGGPKKKPVSRSVKAGLQFPVGRIGRYLKKGRYAQRVGTGAPVYLAAVLEYLAAEVLELAGNAARDNKKNRIIPRHVLLAVRNDEELGKLLAGVTIAHGGVLPNINPVLLPKKTERASKEPKSPSKATKSPKKS

SEQ ID NO: 31150 - protein, 83 aa, Glycine max
  unsure (1)..(83): unsure at all Xaa locations
  Clone ID: TF_LIB3108-040-QI-K1-C8.pep
KKPAEKKPAEEKKSTVVDKAPSEKKPMAGKKLAKEVGXADXGKKKKRNKKSVETYKIYIFKGLKHVHPDIGISSKAMGIMNSF

SEQ ID NO: 31151 - protein, 92 aa, Glycine max
  unsure (1)..(92): unsure at all Xaa locations
  Clone ID: TF_701064730H1.pep
FRYCFRMQIQIARTIQTARKSTGGKASRNEVATKAARKSDPTTGGVKKPHRXRSGTVDLREIMKFQKSTELLIRKLPFQRLVREIAQDFKTD

SEQ ID NO: 31152 - protein, 98 aa, Glycine max
  Clone ID: TF_15201339.pep
MIKKRTNKSVETYLIYIFKVLEEDHPDIGISMDAMGIMNSFLNDIFHKLVHKASRLARYYKISTIASMDILTAVPLLLPGDVSQHALSEGTKADTDIT

SEQ ID NO: 31153 - protein, 98 aa, Glycine max
  unsure (1)..(98): unsure at all Xaa locations
  Clone ID: TF_9902832.pep
APAKAEKKPAEKKPSAEKAPAEKKPNAEKKISNEGGSEKNKKRTKKSVETYKIYIFKVLKQVHPDIGISSKAMGIMNSFINDIFXKLAQQASRLASYY

SEQ ID NO: 31154 - protein, 123 aa, Glycine max
  Clone ID: TF_LIB3051-027-Q1-K1-D2.pep
MARTKQTARKSTGGKAPRKQLATKAARKSAPTTGGVKKPHRYRPGTVALREIRKYQKSTELLIRKLPFQRLVREIAQDFKTDLRFQSHAVLALQEAAEAYLVGLFEDTNLCAIHAKRVTIMPK

SEQ ID NO: 31155 - protein, 147 aa, Glycine max
  unsure (1)..(147): unsure at all Xaa locations
  Clone ID: TF_22541444.pep
APKAEKNPADKKPAEEKKSTVGDNAPAXKKPKAXKKLPNDGCAGGXWKKKKKNKKSVETYKIYIFKVLXXVNPDIDISSKAMGIINSFINDIFEKLSPKSSILAHYNNKPTITSKKIQTTIMLMLPNKLTXHTISKGTKAITKFTXS

SEQ ID NO: 31156 - protein, 144 aa, Glycine max
  Clone ID: TF_GmC110_3.pep
MSSTEAAATEKKGGRGKPKTSKSVSRSSKAGLQFPVGRVARYLKAGRYAQRVGSGSPVYLSAVLEYLAAEVLELAGNAARDNKKTRIVPRHIQLAVRNDEELSKLMGSVTIANGGVLPNIHQNLLPKKVAGKGKTEIGSASQEF

SEQ ID NO: 31157 - protein, 98 aa, Glycine max
  Clone ID: TF_LIB3242-090-Q1-J1-H4.pep
KNQESASAFWKQRPKYFGGALTKERGGKTTGGKAPRKQLATKAARKSAPTTGGEKKPQTNRPGTDALRETRKHQKSTELLNRRLTCQREARETAQKYK

SEQ ID NO: 31158 - protein, 103 aa, Glycine max
  unsure (1)..(103): unsure at all Xaa locations
  Clone ID: TF_LIB3108-025-Q1-K1-A5.pep
IITEYYPHGSRGPVVALRLAPRHAVLLPDLITHVDEYAPPVINPKAANKISNEGGSENNKKRTKKSVETYNIYIFXVLKHVHPDICVFSLAVVFINSFINDIF

SEQ ID NO: 31159 - protein, 136 aa, Glycine max; identical to SEQ ID NO: 6802
  Clone ID: TF_GmC1660_1.pep

SEQ ID NO: 31160 - protein, 136 aa, Glycine max; identical to SEQ ID NO: 6802
  Clone ID: TF_GmC1660_2.pep

SEQ ID NO: 31161 - protein, 136 aa, Glycine max; identical to SEQ ID NO: 6802
  Clone ID: TF_GmC40_13.pep

SEQ ID NO: 31162 - protein, 136 aa, Glycine max; identical to SEQ ID NO: 6802
  Clone ID: TF_GmC40_20.pep

SEQ ID NO: 31163 - protein, 136 aa, Glycine max; identical to SEQ ID NO: 6802
  Clone ID: TF_GmC40_23.pep

SEQ ID NO: 31164 - protein, 136 aa, Glycine max; identical to SEQ ID NO: 6802
  Clone ID: TF_GmC40_26.pep

SEQ ID NO: 31165 - protein, 136 aa, Glycine max; identical to SEQ ID NO: 6802
  Clone ID: TF_uC-gmrominsoy113e12b1.pep

SEQ ID NO: 31166 - protein, 121 aa, Glycine max
  unsure (1)..(121): unsure at all Xaa locations
  Clone ID: TF_LIB4391-050-R1-K1-H12.pep
RYLEDQLARTKHIALPTAGGRAAMKQLATKAARKLAPSTGGETKPHRYHSGTDAPREIRNYQRSTXLLMRKLPFQRLDREXAQDLKTDLRVQSHAALALQEGAGAXVAGQFEDSILSAIHA

SEQ ID NO: 31167 - protein, 107 aa, Glycine max
  unsure (1)..(107): unsure at all Xaa locations
  Clone ID: TF_7146544.pep
DSGGKIKKGAGGRKGGGPKKKPVSKSVHAGLQFPVXRIGRYLKKRRYSQRVGTGAPVYWAAILEYLAAEVLEXAGNAARDNEENRIISRHVLLAVRNYEELGNCLLG

SEQ ID NO: 31168 - protein, 139 aa, Glycine max
  Clone ID: TF_GmC128_1.pep
MASRGKTQGSGTTKKGISRSNKAGLQFPVGRIARYLKIGKYADRIGSGAPVYLASVLEYLAAEVLELAGNAAMDNKKTRIMPRHIQLAVRNDEELSRLLGDVTIASGGVTPNIHNMLLPKKVGTSTSTFMGPSADDDDA

SEQ ID NO: 31169 - protein, 101 aa, Glycine max
  Clone ID: TF_GmC156942_1.pep
MAPKTADTKQTASKAPAKAPASKAPAKAPAKKPASGDKKKSKKRVESYTSYIFKVLKQVHPDTGVSNKAMSIMNSFVNDIFERVADEASRLAAYNKRSTIS

SEQ ID NO: 31170 - protein, 99 aa, Glycine max
  Clone ID: TF_GmC732_13.pep
MAPAKAEKKPAEKKPAAEKAPAEKKPKAEKKISKEGGSEKKKKRTKKSVETYKIYIFKVLKQVHPDIGISSKAMGIMNRVILVLFGELAQHAVRLARYP

SEQ ID NO: 31171 - protein, 140 aa, Glycine max; identical to SEQ ID NO: 31140
  Clone ID: TF_GmC1624_1.pep

SEQ ID NO: 31172 - protein, 140 aa, Glycine max
  Clone ID: TF_GmC1624_2.pep
MSSTGGSTKGGRGKPKASKSVSRSQKAGLQFPVGRIARFLKAGKYAERVGAGAPVYLSAVLEYLAAEVLELAGNAARDNKKNRIVPRHIQLAVRNDEELSKLLGSVTIANGGVLPNIHQTLLPKKVGKGKGEIGSASQEF

SEQ ID NO: 31173 - protein, 152 aa, Glycine max
  unsure (1)..(152): unsure at all Xaa locations
  Clone ID: TF_LIB5068-020-A1-XP1-B7.pep
PATQQSAKHPPPRPAPPEAPRKPQTARTKQTARKPTGGKAPRKQPATKAARKPAPATGGAKKPHRPRPGTAAPRETRNHQKSTERPTRKPPTQXKDRETAQDPKTDQRPQSSAETAPQEAAEAHPGGHPEDTNPSATHANTGTKRPKDQQPA

SEQ ID NO: 31174 - protein, 152 aa, Glycine max
  unsure (1)..(152): unsure at all Xaa locations
  Clone ID: TF_LIB4202-010-Q1-K2-B3.pep
PGGKGPXKQLATKGARKSAPTTGGVKKPHRYRPGTVALRGRGGGXXSTQLXIRKLPFQRGGREIAQDFKTELRFQSHAVLALQEAAEAYLVGLFEXTNLCAIHAKRVTIMPKDIQLGRRSPGERAVGGWKDEDWGLRVVFLVFRFLFLFNRW

SEQ ID NO: 31175 - protein, 136 aa, Glycine max; identical to SEQ ID NO: 6802
  Clone ID: TF_GmC1660_3.pep

SEQ ID NO: 31176 - protein, 49 aa, Glycine max
  Clone ID: TF_uC-gmflLIB3260P099c12b1.pep
PTRSFTRPAAEAYLVGLFEDTNLCAIHAKRVTIMPKDIQLARRIRGERA

SEQ ID NO: 31177 - protein, 136 aa, Glycine max
  Clone ID: TF_GmC745551_1.pep
MARTKQTARKSTGGKAPRKQLATKAARKSAPTTGGVKKPHRYRPGTVALREIRKYQKSTELLIRKLPFQRLVREIAPDFKTDLRFQSHAVLALQEAAEAYLVGLFEGTIWCAIHAERVTVMPKDMQLARRIRCEQA

SEQ ID NO: 31178 - protein, 122 aa, Glycine max
  unsure (1)..(122): unsure at all Xaa locations
  Clone ID: TF_LIB4165-005-Q1-K1-G1.pep
MGADGESKKGARGREGGGPXKKPGSRGVKAGLQFPVXRDWRDLRRRGGAQRVXAGAPVYLAAGLEYLAAEVLXCGGNAARDNKKNRSIPRDVLXGXRSYEEXXKLVXWVTIAHGGVLPNINP

SEQ ID NO: 31179 - protein, 83 aa, Glycine max
  unsure (1)..(83): unsure at all Xaa locations
  Clone ID: TF_700754394H1.pep
HSWKKKKKLFKLALTKQTGRNSTGGKAPRKLFATRVALKSAPXTGGVKKPNRYRPGTVALREFRKSQKVTELLIRKLPFQRLV

SEQ ID NO: 31180 - protein, 129 aa, Glycine max
  unsure (1)..(129): unsure at all Xaa locations
  Clone ID: TF_LIB4204-012-R1-N1-H3.pep
KKLPKKVGAGGEGKKKXRHTKCVYSSLLCMFKVLKQFHPGIGISSKALGIMSSFSLAMFVKLVQESSRIARSIKGPFIPWRGIQSPVRFVMPGFLTEPTVSQGSKAVAKVISSCISYFIAFLSLFFVTH

SEQ ID NO: 31181 - protein, 158 aa, Glycine max
  Clone ID: TF_GmC394_1.pep
MARVKHTPASRKSAKKQAPRASTSTQPPPQSQSPATRERRRAQQVEPQQEPEAQGRKKRRNRSGTVALREIRHFQRSCELLIPAAPFIRCVKQITNQFSTEVSRWTPEAVVALQEAAEEYLVHLFEDGMLCAIHARRITLMKKDIELARRLGGIGRPW

SEQ ID NO: 31182 - protein, 91 aa, Glycine max
  unsure (1)..(91): unsure at all Xaa locations
  Clone ID: TF_uC-gmroLIB3259P159d11a1.pep
VALREIXRKYQKSTELLIRKLPFQRLVREIAQDFKTDLRFQSHAVLALQEAAEAYLVGLFEDTNLCAIHAKRVTIMPKDIQLARRIRGERA

SEQ ID NO: 31183 - protein, 136 aa, Glycine max
  unsure (1)..(136): unsure at all Xaa locations
  Clone ID: TF_LIB4392-018-R1-K1-D6.pep
MARTKQTARKSTGGKAPRKQLATKAARKSAPTTGGVKKPHRYRPGTVALREIRKYQKSTELLIRKLPFQRLVREIAQDFKTDLRFQSHAVLALQEAAEAYLVGLFEDTNLWAIHAQRVTIMPKDIXLARRIPGERA

SEQ ID NO: 31184 - protein, 78 aa, Glycine max
  unsure (1)..(78): unsure at all Xaa locations
  Clone ID: TF_700567927H1.pep
SEARTKQTAXKXSTGGKAXRKQLXXKAARKXAXTTGGVKXPHRYRPGTVALREIRKYQKSTELLIRKHPFQRLVRELL

SEQ ID NO: 31185 - protein, 48 aa, Glycine max
  unsure (1)..(48): unsure at all Xaa locations
  Clone ID: TF_LIB3040-041-Q1-E1-E10.R5.pep
LPCLHSXAAXAYLVGLFEDTNLCAIHAKRVTIMPKDIQLARRIRGERA

SEQ ID NO: 31186 - protein, 99 aa, Glycine max
  Clone ID: TF_jC-gmro02910067f08d1.pep
KPHPFRPGRGVLREILKAQKSPELLIRKLPFQRLVKEIAQDFKTDFRFQKNPVLAFQETPEAFLVGLFEDPNLCAIPVKRVSLMPKGIQLARKIKGEKA

SEQ ID NO: 31187 - protein, 56 aa, Glycine max
  Clone ID: TF_LIB3049-044-Q1-E1-D7.pep
TDLRFHSHSVLALQEAADAYLVGLFEDTNLCAIHATRVTIMPKDIQLARRIRGERA

SEQ ID NO: 31188 - protein, 63 aa, Glycine max
  Clone ID: TF_LIB4204-008-R1-N1-H5.pep
MTSFINRIFEKLGQEFFRLARYNKKPPLLLREIQPPVRLVLPGELAKPPVFEGPKGVPKFLSF

SEQ ID NO: 31189 - protein, 127 aa, Glycine max
  unsure (1)..(127): unsure at all Xaa locations
  Clone ID: TF_jC-gmst024120e12a1.pep
RKAPRKQLATKAARXSAPTTGGVKKPHRYRPGTVALREIRKYQKSTELLIRKLPFQRLVREIAQDFKTDLCFQSHAVLALQEAAEAYLVGLFEDTNLCAIHAKRVTIMPXDIQLAXRIRGERARGGG

SEQ ID NO: 31190 - protein, 136 aa, Glycine max
  Clone ID: TF_GmC92043_2.pep
MARTKQTARKSTGGKAPRKQLASKAARKSAPSTGGVKKPHRYKPGTVALREIRRYQKSTELLIRKLPFQRLVREIAQDFKSDLRFQSSAIGALQESVEAYLVSLFEDTNLCAIHAKRVTIQSKDIQLARRLRGERG

SEQ ID NO: 31191 - protein, 89 aa, Glycine max
  unsure (1)..(89): unsure at all Xaa locations
  Clone ID: TF_700787362H2.pep
RATFSASYHTVXMDRTKQTARKSSGGNAPRKQLATKAARKSAPATGGVKKPHRFRPGTXALREIRKYQKSTELLIRKLPFQRLVREIAQ

SEQ ID NO: 31192 - protein, 74 aa, Glycine max
  Clone ID: TF_jC-gmfl02220084b08a1.pep
LLRYTKIVVTYKIYIFKVLKQVHPDIGISCKAMGIMNSFINDIFDMLAQVSSRLARYNKKPTITSREIQTAVRL

SEQ ID NO: 31193 - protein, 119 aa, Glycine max
  unsure (1)..(119): unsure at all Xaa locations
  Clone ID: TF_9900407.pep
AGRRNVGRPKKKPVSTSVKASLHFPIRPIGRSFKKGRYAHRVGTGAPVYLTKLLQYLSAKVLKFSENAARDNKKNMIIPIHVLLAVKNDNDLXKLLTDVTITHNNILADINPIVLPKKT

SEQ ID NO: 31194 - protein, 136 aa, Glycine max
  Clone ID: TF_GmC92043_1.pep
MARTKQTARKSTGGKAPRKQLASKAARKSAPSTGGVKKPHRYKPGTVALREIRRYQKSTELLIRKLPFQRLVREIAQDFKSDLRFQSSAIGTLQESVESYLVSLFEDTNLCAIHAKRVTIQSKDIQLARRLRGERN

SEQ ID NO: 31195 - protein, 117 aa, Glycine max
  Clone ID: TF_LIB3051-063-Q1-K1-F7.pep
MKFQRLPGPVGQGYRLELEKKKKLFEMARTKQTARKSTGGKAPRKQLATKAARKSAPTTGGVKKPHRYRPGTVALREIRKYQKSTELLIRKLPFQRLVREIAQDFKTDLRFQSHAVL

SEQ ID NO: 31196 - protein, 140 aa, Glycine max
  unsure (1)..(140): unsure at all Xaa locations
  Clone ID: TF_16278806.pep
MAPKAEKKPAEKKPAEEKKSTVGDKAPAEKKPKAXKKLPKEXGAGGEGKKXKENKKSVETYKIYIFKGLKQXHPDIGISSQAMGIMNSFINDIFXKLAPESSKLARYNKKPTITSRGIQTAVRLVLPGELANHARFEGPK

SEQ ID NO: 31197 - protein, 134 aa, Glycine max
  Clone ID: TF_7925666.pep
RTKQTAHKSTRGKAPKKQLATKAAHKSTPTTGDIKKPHHYRPSTITLHKIIKYQKTTELLIQKLPFHKAIHKITQDFNTNLHFHSHTILTLQKPTKSYLIKLFRNTNLYAIHTKHITIIPKYIQLSIKIHNKRS

SEQ ID NO: 31198 - protein, 134 aa, Glycine max
  unsure (1)..(134): unsure at all Xaa locations
  Clone ID: TF_8669694.pep
RTKQTARKSTGGKAPRKQLATKAARKSAPTTGGVKKPHRYRPGTGALREIRKYQKSTXLLIRKLPFHRLVREIAQDFKTDLRLQSHAVLALQDAAGAYLVGLFEDTNLCAIHAKLVTIMPIDIQLARRIRGERA

SEQ ID NO: 31199 - protein, 90 aa, Glycine max
  unsure (1)..(90): unsure at all Xaa locations
  Clone ID: TF_6070218.pep
GVNKPHRFRPGTMALKEIKKYQKSTELLIRKLPFQYLAREIAXDFKTDLMLQSSSVAALQEAADADLVGLCEDTNLCDIIPXRVTVMPTD

SEQ ID NO: 31200 - protein, 62 aa, Glycine max
  Clone ID: TF_LIB3108-022-Q1-K1-E11.pep
VPRHVCLAVRNDEELGRLLGGVTIAHGGVLPSINPVLLPKKTGKEGVEPKSPKKAAKSPKKA

SEQ ID NO: 31201 - protein, 136 aa, Glycine max
  Clone ID: TF_LIB5118-014-A2-PF1-F6.pep
MARTKQTARKSTGGKAARKQLATKAARKSAPTTGGVKKPHRYRPGTVALREIRKYQKSTELLIRKLPFQRLVREIAQDFKTDLRFQSHAVLALQEAAEAYLVGLFEDTNLCAIHAKRVTIMPKDIQLARRIRGERA

SEQ ID NO: 31202 - protein, 113 aa, Glycine max
  unsure (1)..(113): unsure at all Xaa locations
  Clone ID: TF_LIB4392-013-R1-K1-G4.pep
MARTKQTARKSTGGKAPRKQLATKSAPTTGGVKKPHRYRPGTVALREIRKYQKSTELLIRKLPFQRLVREIAQDFKTDLRFQSHAVLALQEAAEAYLXVGLFEDTNLCAIHAK

SEQ ID NO: 31203 - protein, 80 aa, Glycine max
  unsure (1)..(80): unsure at all Xaa locations
  Clone ID: TF_8827097.pep
EKKPAEKKPEADNAPAEKTTAXKNIPKDATSGEKKKKMTKNSMETYKIYIFKVAQQFTLRLYLHKARVIMQSLMNEIFEK

SEQ ID NO: 31204 - protein, 143 aa, Glycine max
  unsure (1)..(143): unsure at all Xaa locations
  Clone ID: TF_jC-gmfl02220084h12a1.pep
MARTKQTARKSTGGXAPTKQLATKAARKTGPTTGGVTKPDRYRAGTVALRESRIYQKSTELMIRTLPLQKLVRERAQDSTTELRVQSHTVLALQEAAEAYLEELCEDTSPRAIDAKHVTIMPNDIQLTGKIRGERARDGSWKD

SEQ ID NO: 31205 - protein, 61 aa, Glycine max
  Clone ID: TF_LIB4164-029-Q1-N1-C3.pep
NKKPRIVPPHTQLAVRNPEKLTQLLGDVPTANGGVMPNIPNLLLPKKAGGPPKGAAPADPP

SEQ ID NO: 31206 - protein, 134 aa, Glycine max
  Clone ID: TF_15001070.pep
MARTKQTARKSTGGKAPRKQLATKAARKSAPTTGGVKKPHRYRPGTVALREIRKYQKSTELLIRKLPFQRLVREIAQDFKTDLRFQSHAVLALQEAAEAYLVGLFEDTNLCAIHAQRVTIMPQDISLARKIPGE

SEQ ID NO: 31207 - protein, 144 aa, Glycine max
  unsure (1)..(144): unsure at all Xaa locations
  Clone ID: TF_jC-gmXLIB3563P041dc06d1.pep
DPASDHFSNRLQGGTAGDRTNTCDSVYYLTIHTQNLGARNRTSGRTIKKGAGGRKGGGPNKRPVKTFGGAGSNXPVGRIGQDWKKGRYAQGLRTAAPVYLAAYLEYLSAEVLESAVTAARARXKNKTISRHVLTTKRNDNELRK

SEQ ID NO: 31208 - protein, 149 aa, Glycine max
  unsure (1)..(149): unsure at all Xaa locations
  Clone ID: TF_GmC128_2.pep
MASRGKTQGSGTTKKGISRSNKAGLQFPVGRIARYLKIGKYADRIGSGAPVYLASVLEYLAAEAIFLNRLXIFVLELAGNAAMDNKKTRIMPRHIQLAVRNDEELSRLLGDVTIASGGVTPNIHNMLLPKKVGTSTSTFMGPSADDDDA

SEQ ID NO: 31209 - protein, 53 aa, Glycine max
  Clone ID: TF_LIB3170-016-Q1-K1-C5.pep
GRIVPRHIQLAVWSDQEFSQLIGSFTISHGGVLANIHQNLLPKKVACQGETQI

SEQ ID NO: 31210 - protein, 100 aa, Glycine max
  Clone ID: TF_LIB3139-043-P1-N1-D5.pep
MARTKQTARKSTGGKAPRKQLATKAARKSAPTTGGVKKPHRYRPGTAALREIRKYQKSTELLILKLPFQRLVREIAQDFKTDLAFQSHAVLALQEAAEAY

SEQ ID NO: 31211 - protein, 83 aa, Glycine max
  unsure (1)..(83): unsure at all Xaa locations
  Clone ID: TF_LIB3073-002-Q1-K1-G3.pep
MAPAEADKKPPEKKPAAEKAPTDKNPKAXKKISDEGRREKKKTRTKKSVETYKIYIVKVLTQVHPDIGITSKDMGIMNSFIID

SEQ ID NO: 31212 - protein, 110 aa, Glycine max
  unsure (1)..(110): unsure at all Xaa locations
  Clone ID: TF_LIB3049-047-Q1-E1-D10.pep
MARTKQTARKSTRRKAPKKQLATKAARKSAPTTGGVKKPQRYRPGTVALRGIRKYQKSTELLIRKLPFQKLVREIAQDFKTDLRFPEHAVLALQEAAEAYLVGLFXDTNL

SEQ ID NO: 31213 - protein, 143 aa, Glycine max
  unsure (1)..(143): unsure at all Xaa locations
  Clone ID: TF_LIB3138-084-P1-N1-C6.pep
PRIPPQVSIQNSLFPFWNQNRKCFYLARPNQPARKQTGGKAPRKQLATKAARKSAPTTGGVKKPHRFRPGTVALREIRKYQKSTELLIRKLPFQRLVRDIAHDFKTDLRFQSHAVLALQEAAEAYLVGLFEDTNXCAIHAKRV

SEQ ID NO: 31214 - protein, 64 aa, Glycine max
  unsure (1)..(64): unsure at all Xaa locations
  Clone ID: TF_LIB4164-023-Q1-N1-A7.pep
EIAQDFKTILGFQXSHAVLALQEAAEAILVGLFEDTNLCAIHAKGVTIMPKDIQLARRIRGERA

SEQ ID NO: 31215 - protein, 105 aa, Glycine max
  unsure (1)..(105): unsure at all Xaa locations
  Clone ID: TF_4405547.pep
KQTXXKXTGGKAXRKQLATKAAXKXAPTTGXXKKPHXXXPXTXALXEIRKYQKSTELLIRKXPFQRLGRRKCSRTSRLILRFPEPTPPCHLQESLLRPYPWLGLF

SEQ ID NO: 31216 - protein, 105 aa, Glycine max
  unsure (1)..(105): unsure at all Xaa locations
  Clone ID: TF_LIB5068-030-A1-XP1-F6.pep
GSGENNPHRYRPGTVALREITKYQKSTELLFRKLPFQRLVREIGQHFKTDLRFQSHDVLALQEAAEAYLVWALXEDTILCAIHAKRVTIMPNDIHLGRRIRGERA

SEQ ID NO: 31217 - protein, 72 aa, Glycine max
  Clone ID: TF_LIB4390-022-R1-N1-A8.pep
VLELAGNPPKNNKKTRIVPPPPQLAVRNPQKFSQLLGDVPLANGGVMPNIPNLFFSKKGGGSSKGAAAAHDF

SEQ ID NO: 31218 - protein, 55 aa, Glycine max
  Clone ID: TF_LIB3242-404-P1-J1-C11.pep
MQGEPRKHLTTKAAKKSAPTTDLMKKPHDFHPSTMALMKIRKYQKNTELLIQKLP

SEQ ID NO: 31219 - protein, 99 aa, Glycine max
  unsure (1)..(99): unsure at all Xaa locations
  Clone ID: TF_LIB3167-079-P1-K1-H5.pep
MFGKRVGTNQTARRXTGGKAPRKQLATKAVGRSVPATGGVKKPPRFRPGTGALSRIRKSQKSPGLLIRKLPFQRWFQGIAQDLRTDLRFKSSSVFRFKE

SEQ ID NO: 31220 - protein, 118 aa, Glycine max
  unsure (1)..(118): unsure at all Xaa locations
  Clone ID: TF_10234512.pep
ADMKPVADNTISMDGRSYMISMRTEKSVPTYKIYIFNVXNQVLPYMSIFGQAMVIMISFVSNIFKKLAQESSRLARYHMKLSITSMEIHAAARLVLPGXLAMHAASGGALVVAIFSIS

SEQ ID NO: 31221 - protein, 107 aa, Glycine max
  Clone ID: TF_jC-gmX3039042H07sg7A3b1.pep
MARTKQAAGQITGGKAARKQFATKAARKYAPTTVGVKKSHRYRPGTVALREIRKYHKSTELLIRKLTFQRLVREIDQYCKTDLRYQRHAVLALQEACDAYLDGLFED

SEQ ID NO: 31222 - protein, 85 aa, Glycine max
  Clone ID: TF_LIB3242-723-P1-J1-H12.pep
IRKYQKSTELLIRKLPFQRLVREIAQDFKTDLRFQSSAVSALQKAAEAYLVGLFEDTNLCAIHAKRVTIMPKDIQLARRIRGERA

SEQ ID NO: 31223 - protein, 134 aa, Glycine max
  unsure (1)..(134): unsure at all Xaa locations
  Clone ID: TF_LIB4204-007-R1-K1-D5.pep
MARTKQTARKSTGGKAPRKQLATKAARKSAPATGGVKKPHRFRPGTVALREIRKYQKSTELLIRKLPFQRLVREIAQDFKTDLRFQSSAVSALQEAAEAYLVGLFEDTNLCAIHAKRVTIMPKDIQLARXIRGE

SEQ ID NO: 31224 - protein, 132 aa, Glycine max
  unsure (1)..(132): unsure at all Xaa locations
  Clone ID: TF_LIB4164-052-R1-N1-C9.pep
PKAGKKLPKKGGPAGKGKKKKRTPKGGGPTKISFFKVFKRVPPPFGFSSKALGFLNSFFNDFFXKVAPDFFKFARSTKKPPLPSREFXPPVRLFLPGDLAKPPVFWGAKAVPKFPSFLTDFFAPSLRFRGFF

SEQ ID NO: 31225 - protein, 96 aa, Glycine max
  Clone ID: TF_18731884.pep
DRTKQTACMHIGGKAPRKQLATKAARQLVFFFGGVKKPHRYRPVSLALREICMCHNSRERLLHKLPCLRLVREIARDCMTDLRCKTSAVSALLEAA

SEQ ID NO: 31226 - protein, 133 aa, Glycine max
  unsure (1)..(133): unsure at all Xaa locations
  Clone ID: TF_6667439.pep
RTKQTARKSTRGKAPKKQLATKAARKSAPTTGGVKKPHQYHAGTIALRKIEKYQKSTXLVMQKLPLQKLGSXMTEDFKTDLHVQSRXMLALRKAAEAYVGKLCRDTNLGTMHAKRIAIRRKDIRLARKIGGKR

SEQ ID NO: 31227 - protein, 135 aa, Glycine max
  unsure (1)..(135): unsure at all Xaa locations
  Clone ID: TF_LIB5118-005-B1-PF1-B11.pep
MARTKQTARKSTGGKAPRKQLATKAARKSAPTTGGVKKPHRYRPGTVALREIRKYQKSTELLIRKLPFQRLVREIAQDFKTDLRFQSHAXLFADXPEXYLVGLFEDTNLCAIHAKRVTIMPKDIQLARRIRGERA

SEQ ID NO: 31228 - protein, 94 aa, Glycine max
  Clone ID: TF_LIB5068-015-A1-XP1-H12.pep
MARTKQTARKSTGGKAPRKQLATKAARKSAPTTGGVKKPHRYRPGTVALREIMKYHKSTELLIRKLPFQKLVREIAQDFQTDLRFHSHALLVFP

SEQ ID NO: 31229 - protein, 109 aa, Glycine max
  unsure (1)..(109): unsure at all Xaa locations
  Clone ID: TF_LIB3049-053-Q1-E1-A8.pep
NLCIPLTQDSASAFWKQRPKHFEMARTKQTARKSTGGQAPRKQLATSAARKSAPTTGGVKNPHRHRPGAVALREIMTYQKSXEHLIRTHPFQTLVRESAQDVTTDMRFQ

SEQ ID NO: 31230 - protein, 47 aa, Glycine max
  Clone ID: TF_uC-gmroLIB3258056g05a1.pep
FQALQETAEAYLVGLFENTNLCAIDAKRVTIMPKNIQLARRIRGKRA

SEQ ID NO: 31231 - protein, 128 aa, Glycine max
  Clone ID: TF_GmC80_1.pep
MSGKGAKGLITAKDKDKKKPISRSSRAGLQFPVGRIHRLLKSRVTAHGRVGATAAVYSAAILEYLTAEVLELAGNASKDLKVKRITPRHLQLAIRGDEELDTLIKGTIAGGGVIPHIHKSLINKSSKE

SEQ ID NO: 31232 - protein, 138 aa, Glycine max
  Clone ID: TF_GmC732_2.pep
MAPAKAEKKPAEKKPAEKAPAEKKPKAEKKISKEGGSEKKKKRTKKSVETYKIYIFKVLKQVHPDIGISSKAMGIMNSFINDIFEKLAQESSRLARYNKKPTITSREIQTAVRLVLPGELAKHAVSEGTKAVTKFTSS

SEQ ID NO: 31233 - protein, 138 aa, Glycine max
  Clone ID: TF_GmC732_3.pep
MAPPKAEKKPAEKKPAEKAPAEKKPKAEKKISKEGGSEKKKKRTKKSVETYKIYIFKVLKQVHPDIGISSKAMGIMNSFINDIFEKLAQESSRLARYNKKPTITSREIQTAVRLVLPGELAKHAVSEGTKAVTKFTSS

SEQ ID NO: 31234 - protein, 144 aa, Glycine max; identical to SEQ ID NO: 31156
  Clone ID: TF_GmC110_1.pep

SEQ ID NO: 31235 - protein, 133 aa, Glycine max
  Clone ID: TF_GmC16229_1.pep
MAKAAEKKPAAEKSPAEKKPKAEKKIPKEGGGEKKKKRSKKSVETYKIYIFKVLKQVHPDIGISSKAMGIMNSFINDIFEKLAQEAARLARYNKKPTITSREIQTAVRLVLPGELAKHAVSEGTKAVTKFTSS

SEQ ID NO: 31236 - protein, 133 aa, Glycine max
  Clone ID: TF_9259414.pep
KSNVTEEEKAREVVHVRARRGQATDSHSLAERVRRGKINEKLRCLQNIVPGCYKTMGMAVMLDEIINYVQSLQHQVEFLSLKLTAASTFYDFNSETDALETMQRARASEAKELGKYKKEGYGGVSFFQPAWPL

SEQ ID NO: 31237 - protein, 269 aa, Glycine max
  unsure (1)..(269): unsure at all Xaa locations
  Clone ID: TF_GmC700886_1.pep
RDLPDSSQKDNDLGASRKVLNFPHFSTPRNNVSSAPGSTQFREKTTANLSQSEAREYSVITVGSSHCGSSHIPQEKDVSRVSSSAVWATNNNNSLSAEPEAVRDCVQRPICPRSDKGKSEMIEPTVTSSSGGSGSTGIGRTCSLSTRDHGQKRKGTEEEASEEQSEATELKSADGNKASQRTGSSKRNRAAEVHNQSERRRRDRINEKMRTLQQLIPNSDKTDEASMLEEXIEYLKSLQFQLQVMVXGVCMTPVMFPGIQHYMSQMGMG

SEQ ID NO: 31238 - protein, 236 aa, Glycine max
  Clone ID: TF_GmC1214_2.pep
MVSRENTNWLFDYGLIDDIPVPDATFGVNSSAFTWPPNALNASSNVGVEIDGSLGDSDSLKESGSKKRVRSESCAASGSKACREKLRRDRLNDKFVELGAILEPGRPAKTDKAAILIDAVRMVTQLRGEAQKLKDTNQGLQEKIKELKAEKNELRDEKQRLKAEKEKLEQQLKSLNAQPSFMPPPAAIPAAFAAQGQAHGNKLVPFISYPGVAMWQFMPPAAVDTSQDHVLRPPVA

SEQ ID NO: 31239 - protein, 181 aa, Glycine max
  Clone ID: TF_GmC1444_1.pep
MENNPSSSRVDRKFIERNRRNQMKALFRKLNSLVPHQRSKEAIPLPDQLEEATNYIKKLQINLEKMKDKKNMLLGNERPNERMNNDGRRVGLKSPRIEIQQMGSALEVVLITGLDSQFMFGETIRVLHEEGVDVVNASYKVIEDAVFHSIHCQDKEETANGAARISERLKNFIHDSSYNAF

SEQ ID NO: 31240 - protein, 246 aa, Glycine max
  Clone ID: TF_GmC1305_1.pep
MLPLFRGNELVMQFSNRPQRQQHKISEDLILDDYASLNVNDSNQKFITSSSSQPTKKLFYGANKKNHDSPEQAKKMIHKEIERQRRQEMATFYASLRSLLPLEFIKGKRSISDHMNEAVNYIKHMQKHIKELGAKRDELKKLSNHSNNMENNHEGLHTSCNFTVHEKNGIIGIEITSVFREEKPKISKLLQFLTEEGLEVVSFFSTEVNGRLLHSVQCEVNHSNSVDPSELRKKVSKAFSTFRCSD

SEQ ID NO: 31241 - protein, 196 aa, Glycine max
  Clone ID: TF_GmC5053_2.pep
NQLTVLVSVPVIRITRIWKLNQRFYALRAVVPNVSKMDKASLLGDAILYINELKSKLNVLDSEKTELEKQLDSTKKELELATKNPPPPPPPPPPPGPPPSNSVEPKKTTSKLADLELEVKIIGWDAMVRIQCSKKNHPAARLMAALKDLDLEVHHASVSVVNDLMIQQATVNMGNKFYTQEQLLSALSSKVGDELR

SEQ ID NO: 31242 - protein, 222 aa, Glycine max
  unsure (1)..(222): unsure at all Xaa locations
  Clone ID: TF_GmC234074_1.pep
MEFYDQDFLEELMTLRRETWDTNPRTEENQFFDGGSFDCFDQNSLPYLPNSSCGQEVPQTYNNDYPFSEIYGSLLDESSPQIMDSFYSTLDTPLNTPPFLGQEDYPILSMMEEEEQGLLGEELKNLELQTTCKMEPTQSSEMPVFNMGTGLERKNRSKKLQGQPSKNLMAERRRRKRLNDRLSMLRAIVPKISKMDRTSILGDTIDYMKELLXKINNLQACK

SEQ ID NO: 31243 - protein, 215 aa, Glycine max
  unsure (1)..(215): unsure at all Xaa locations
  Clone ID: TF_GmC1214_4.pep
MVSPENSNWLFDYPLIDDVIPVGDASFSVSASAFSWPPPPANVSVEIDASLGDSDGPKDTALKKRARCDSSTASSSKACREKLRRDRLNDKFVELGSILEPGRPPKTDKAAILIDAARMVTQLRDEALKLKDSNTSLQEKIKELKAEKNELRDEKQRLKAEKEKLEMQVKSMNAQPAFLPPPPAIPAAFAPQGQAPGNKLMPFIRVPGVAMWXFM

SEQ ID NO: 31244 - protein, 111 aa, Glycine max
  Clone ID: TF_21888659.pep
MEMEDFLWGGGIDVDVTKRKSDGFEGSNGVIGSGWCGSSFSLVLDRERGELVEEPVRLEKKGVSTERSIEALKSHSEAERKRRARINAHLDTLRSVIPGAMKMDKASLLGE

SEQ ID NO: 31245 - protein, 282 aa, Glycine max
  Clone ID: TF_GmC253_1.pep
MDCSAARKTQKADREKLRRDRLNEQFVELGNILDPDRPKNDKATILCDTIQLLKDLTSQVSKLKDEYAMLNEESRELTLEKTDLREEKASLKSDIDNLNNQYQQQLRTMFPWTAMDHSVMMAPSSYPYPVPMAVPPGPIPMQPYPFFANQHPAVISNPCSTYVPYLAPNTIVEQQSTLYVSPPLHPCARSNVSGKQESKSKSSRESMAEKNEDSNDVTTDLELKTPGSSADQDLSSGQRKSSKLSRRESSCTEGSSLGRCSSSRSVQDSSSSSVAASRKDNE

SEQ ID NO: 31246 - protein, 283 aa, Glycine max
  Clone ID: TF_GmC253_3.pep
ISRSEVEPMDCTAARKTQKADREKLRRDRFNVQFVELGNILDPDRPKNDKATILGDTIQLLKDLTSEVSKLKDEYATLNEESCELAQEKNELREEKASLKSDILKLNNQYQQQLRTVSPWTATDRSIMLAPPSYPYPVPMPIPPAPIAMQPYPFYANQHSAIIPNPCSTFVPYLVPNTLTEQRSTQYMSPPVHPGFRSHVSGKQESRNKSSKESKAEKHEDSNDVTLTPGSSADQDLSSGQRKSSKLSRKESSCTEVSSLDRCSLSCSVQDSSSSSVVHKHKG

SEQ ID NO: 31247 - protein, 150 aa, Glycine max
  Clone ID: TF_LIB4165-033-Q1-K1-D8.pep
PHLLSIYIHSSSSHLFNLHKYIILQINRLIMEESGENWPSDNSYLDEVNDEFGSEDEEGGSFSGMGETDRKKRKRELAERFLALSATIPGFTKTDKTSILANASSYVKQLQQRVRELEQEVQSNVSSNEGATSSCEVNSSNDYYSGWWTK

SEQ ID NO: 31248 - protein, 176 aa, Glycine max
  unsure (1)..(176): unsure at all Xaa locations
  Clone ID: TF_LIB4165-033-Q1-N1-D8.pep
MKREVHFLEWARPPRKKRKRELAERFLALSATIPGFTKTDKTSILANASSYVKQLQXRVRELEQEVQSNVSSNEGATSSCEVNSSNDYYSGGGPNEILPEVKVRVLQKDVLIIIHCEKQKGIMLKILSQLENVNLSVVNSSVLRFGKITLDTHPLLLRFIFFYRQMLIFLLMERFQ

SEQ ID NO: 31249 - protein, 142 aa, Glycine max
  Clone ID: TF_jC-gmXLIB3563P088Aa07a1.pep
GAQPTLFQKRAALRKNMNMSDNKKRKEKDEVVVEDVSFDGSGLNYDSDDLTESNYNDPKEKNGGGGVSSNANSTVTGLDQKGKKKGMPAKNLMAQPRPPKKLNDRLYMLRSVVPKISKMDRASILGDAIEYLKELLQRINDL

SEQ ID NO: 31250 - protein, 81 aa, Glycine max
  Clone ID: TF_GmC253_4.pep
IRPEVEPMDCSAARKTQKADREKLRRDRINEQFVELGNILDPDRPKNDKATILCDTIQLLKDLISQVSKLRDEYAMLNEES

SEQ ID NO: 31251 - protein, 159 aa, Glycine max
  unsure (1)..(159): unsure at all Xaa locations
  Clone ID: TF_GmC253_6.pep
IRPEVEPMDCSAARKTQKADREKLRRDRINEQFVELGNILDPDRPKNDKATILCDTIQLLKDLISQVSKLKDEYAMLNEESRELTLEKTDLREEKASLKSDIDNLNNQYQQQLRTMFPWTAMEHSVMMAPSSYPYPVPLAVPPGPIXMQPYPFFANILQ

SEQ ID NO: 31252 - protein, 183 aa, Glycine max
  Clone ID: TF_GmC2714_3.pep
VRREKISERMKYLQDLVPGCNKVTGKAGMLDEIINYVQSLQRQVEFLSMKLAAVNPRLDLSIDDLFDKDVFSTCATNFPNIGISSTSDISNPAYLQFNSPQQIFSYDGLDPSDMGLRRTISAPVSMPETYLQSSCFTQMLPSSTWEGDFQNLCNFDFDQARATSFPSQLLSGLVEAGNLKMEM

SEQ ID NO: 31253 - protein, 142 aa, Glycine max
  Clone ID: TF_GmC206749_1.pep
PVGQGLLGAGEDRMEQSYSWENWALDKEMGEDEEEFLRDILSKPAFSSESESQAPVVSCSAKSKRAPMTYILSFDNSTITPAPSSPPTLEAQPGKRAKRASHIMAERKRRQQLTQSFIALSATIPGLNKILLSSLASVLEMK

SEQ ID NO: 31254 - protein, 188 aa, Glycine max
  unsure (1)..(188): unsure at all Xaa locations
  Clone ID: TF_LIB4164-021-Q1-K1-C4.pep
MCLPEGERDRERAMALEAVVFPQSQDPFGSGYGSVNTKDFYNYTLLAATYEQQHINKEEEQGGASISTFQPETSNYPYGDWTTSSSSSMLPHLNNELQETTTTTSNTLDSLNTRPKRRRAKSRKNKEEIENQRMTHIVVERNRRKQMNEYLSVLRSLMPDSYIQRGDQASIIGGXLLTFVKELEQKVH

SEQ ID NO: 31255 - protein, 66 aa, Glycine max
  Clone ID: TF_GmC234612_1.pep
MQHSFSGSFSYYPLEASHDHHAPSHEDKALAALRNHKEAEKRRRERINSHLDKLRTLLPCNSKVYI

SEQ ID NO: 31256 - protein, 211 aa, Glycine max
  Clone ID: TF_GmC6699_1.pep
MDQLGIIQPSSSTKVERRLVEKNRRNQMKNLYNKLNSLLPSYNPKEALPLPDQVDEAINYIKSLEAKVKMAQEKKENLQGIRKRSRGCFSNNSANFAATSGFPKSPQLEIHEVGSSLQVVLTCGLDHQFIFYEIIQILHEENIEVRSVNSSLAGDSVLHVVHAEIPQSFLQFGATKVSERLKRFVNGSCSDVETQPELWDFEIGTDDMWGF

SEQ ID NO: 31257 - protein, 157 aa, Glycine max
  Clone ID: TF_17518532.pep
MGQQQQGSQPSPTKVERKIVEKNRRSQMKNLYSELNSLLPTRNPKEAMSLPDQIDEAINYIKSLETKVKLEQEKKERLKERKRTRGGCSSSSEAQGSLKSPNIQIHETGNLLEVILTCGVDSQFMFCEIIRILHEENVEVINANSSMVGDLVIHVVH

SEQ ID NO: 31258 - protein, 51 aa, Glycine max
  Clone ID: TF_GmC2279_10.pep
MPSHKTFRIKKKLAKKMRQNRPIPYWIRMRTDNTIRYNAKRRHWRRTKLGF

SEQ ID NO: 31259 - protein, 348 aa, Glycine max
  unsure (1)..(348): unsure at all Xaa locations
  Clone ID: TF_GmC60110_1.pep
MALEAVVFPQDPFTYGCNNKDFLYSLVGGDGGGGGGSHEYGFQASSEDKPHVGIIINNNNIDHTLHANWDSSSPSVLQSVKEQWDSHSSPEACTVDQSLPRAFPLPPSSSSPEAASSATGRRKRRRTKSAKNKKEIENHRMTHIAVECNRRTRINEYLAVPRSLMPPSXVQRGDQASIIGGTSNFVKELEQLLQCMKGQKKRTKEGSGFSDSSPFSEFFMFPQYSTRATQSSSSSSSKGYPGTCEANNNMARNPSSWAVADIEVTLVDGHANMKILCKKRPGMLLKMVVGLLSLGLSILHLNVTTVDDMVLTSVSVKVEEGCQLNTVDEIAAAVHQLSRTVQEEAVFS

SEQ ID NO: 31260 - protein, 484 aa, Glycine max
  unsure (1)..(484): unsure at all Xaa locations
  Clone ID: TF_GmC1214_1.pep
MLLKKLIINMRMYIPLTIKLKKNPKRFFFISTLQRALLPTAAYSNLSHFVYQITLSITLTHTELESYFAHIRFYIFIAIDSHFGSHSFSLPSNVLSFPSHPQYQTNQFKVHTHTQLGEENREFSEKIRRRRGIGFPGKQYLGMLEYPLIDYVIHVRYFPFFGTRIRGSLDPHPPSMGASKFIRSFGIPMAPQLKHSIDRVDARIYLPLFQTPLHKKQFSIFLSPNHTFNYSNTTLSLEGFSPKIPRARAMVSPENSNWLFDYPLIDXDVIPVGDSSFAVSAWSFSWPPXPPMSVSKLMLRLGDSDGLKNPALKKRTKSDSSTASSSKACREDSXRRDRLNDKFVELGSILEPGRPPKTDKASILIDAARMVTQLRDEALKLKDSNTSLQEKIKELKAEKNELRDEKQRLKAEKEKLEVQVKSMNAQPAFLPPPPAIPAAFAPQGQAPGNKLVPFISYPGVAMWQFMPPAAVDTSQDHVLRPPVA

SEQ ID NO: 31261 - protein, 173 aa, Glycine max
  Clone ID: TF_GmC1094_1.pep
FTSSQAQYQTAKFEEKPNCPNTLLNKLKREESPDAAKKNSPEPAFKRQRIETPSPLPTFKVRKEKLGDRITALQQLVSPFGKTDTASVLHEAIEYIKFLHDQVSVLSTPYMKNNGAPIQHQQDCDNLKDSEGAKQDLRSRGLCLVPISSTFPVANETSVDFWTSTFGGALIGR

SEQ ID NO: 31262 - protein, 124 aa, Glycine max
  Clone ID: TF_GmC1094_2.pep
IETPSPLPTFKVRKEKLGDRITALQQLVSPFGKTDTASVLHEAIEYIKFLHDQVSVLRTPYMKNNGAPIQHQQDCDNLKDSEGPKQDLRSRGLCLVPVSSTFPVANETIVDFWTPTFGGALIGK

SEQ ID NO: 31263 - protein, 342 aa, Glycine max
  unsure (1)..(342): unsure at all Xaa locations
  Clone ID: TF_GmC5663_1.pep
MGSLERSKKKVLLWKKAMLHFSLCFVMGVFTGLAPTGKSSLFSTTVGVSNRTEFAPQPSEMLHLTTNVNRIWIAPMPDTMPVKPRILENEKKKXNKKLHAKKQPQLKPRRLIIIVTPTSTKLPHQAVFLRRLANTIKLVPQPLLWIVVEAKTNSKELPEILRKTGIMYRHVVFKENFTELEAELNHQRNLALKHIEHHRLNGIVHFAGLSNVYDLQFFHQLRDIEVFGTWPTALLAAHRKKVKIEGPVCDSSQVIGWHLKNMNNETDTITPPIHISSFAFNSSILWDSERWGRTSSVQDTSQNSIKFVKQVVLEDEAKLKGIPPEDCSKILLWRFNFRARTH

SEQ ID NO: 31264 - protein, 97 aa, Glycine max
  Clone ID: TF_LIB4164-013-Q1-N1-E8.pep
DVEKESVGVNKEVPARRNGAKKSRSAEVHNLSERRRRDRINEKMRALQELIPNCNKVDLCLISRLCFGTLWKVFNIVVCWLSLRIEASIEYIMVCLI

SEQ ID NO: 31265 - protein, 329 aa, Glycine max
  Clone ID: TF_GmC298_1.pep
MARSAKGHQDEFDDDDEEELLTANNTSFKVKVDEPSTGKRVNPQRSKHSETEQRRRSKINERQALKKRRRKNSFSRFQVLRDLIPQNDQKRDKASFLLEVIEYIQFLQEKLQIYEQTYEGWNQEPTKLTPWRNNHGPAENTTDPSQATQNGSVDEKNNNVSPLLPKNVQNPIESDFSMTTIQKGNIPGSTTEAVPLPMQMRLDMFDPPQLWLDKRNKGNYILPHNDTMKEQEELVNESGSDSISSAYSQGILDSLTQALHSSGVDMSQTNVSVQIDVGRQENAGLIPSASTSKGHENQSVSNPAIARSGVDYCNIDSEQSSKRLRQEAS

SEQ ID NO: 31266 - protein, 84 aa, Glycine max
  Clone ID: TF_LIB3167-024-P1-K1-G12.pep
MEESGENWPSDSYLDDFVNDDLGFDDEEFGSEDDSFSGMGETDRKKRQRELTERFLALSATIPGFKKTDKTSILANASSYVKQL

SEQ ID NO: 31267 - protein, 108 aa, Glycine max
  Clone ID: TF_GmC582_1.pep
EKISERMKILQDLVPGCNKVIGKALVLDEIINYIQSLQRQVEFLSMKLEAVNSRLNSGIEAFPPKDFGQQAFDPAGIPFGSQAPREYSRGSSPDWLHMQIGGSFERTT

SEQ ID NO: 31268 - protein, 139 aa, Glycine max
  unsure (1)..(139): unsure at all Xaa locations
  Clone ID: TF_LIB3242-176-Q1-J1-D9.pep
MESYYYSGWPLAQFNSAPNSDQLSPFSVPTTTQQTLPLVATSTSDPAAAASLQFGEFPSWPAPIAAEDRAASASKSHSQAEKRRRDRXNAQLATLRKLIPMSDKMDKATLLGSVVDHVKDLKRKAMDVSKAITVPTETD

SEQ ID NO: 31269 - protein, 173 aa, Glycine max
  Clone ID: TF_GmC819708_1.pep
DRLYMLRSVVPNISKMDRASILGDAIEYLKELLQRISELHNELESTPAGGSSSFLHHPLTPTTLPARMQEELCLSSLPSPEGHPANARVEVGLREGRGVNIHMFCDRKPGLLLSTMTALDNLGLDIQQAVISYVNGFAMDIFRAEQRNEGQDVHPEQIKAVLLDSAAGFHSMS

SEQ ID NO: 31270 - protein, 213 aa, Glycine max
  Clone ID: TF_GmC710842_1.pep
EKGELVEAPVKLERKGVSPERSIEALKNHSEAERRRRARINAHLDTLRSVIPGAKKLDKATLLGEVIRHLKELKTNATQASEGLMIPKDSDEIRVEEQEGGLNGFPYSIKASLCCEYKPGLLADIRQALDALHLMIIRAEIATLGGRMNSVFVIISCKEQNIEDPEYRQFLAGSVHQALRSVLDRFSVSQDMLESRKRRRISIFSSSSIGDFF

SEQ ID NO: 31271 - protein, 267 aa, Glycine max
  Clone ID: TF_GmC2302_1.pep
MIPDSTFSPAYSLAEIWPGMPHFPPPFPHPSSADHSTLTDLTATPRKTKDCSSSSSSASTAAADEDDCSKVLSSTTTATANLSNNDSGSNKQMKLGGSSVENDGFKAEAEASSAGGNKSSEQSNKPCEAPKQDYIHVRARRGQATDSHSLAERARREKISERMKILQDLVPGCNKVIGKALVLDEIINYIQSLQRQVEFLSMKLEAVNSRMNMNPTIDGFPSKDVGTQPFDIAGMVFGSQAARGYAQGSSPPGWLHMQIGGGFERTT

SEQ ID NO: 31272 - protein, 263 aa, Glycine max
  Clone ID: TF_GmC1355_1.pep
FSPRGKTREKEKDEEVEDLSFDGSGLNYDSDDLTESNYNNVSEGNTGKNGGVSSNANSTVITGLDQKGKKKGMPAKNLMAERRRRKKLNDRLYMLRSVVPKISKMDRASILGDAIEYLKELLQRINDLHNELESTPVGSSLTPVSSFHPLTPTPPTLPSRIKEELCPSSLPSPNGQPARVEVRLREGRAVNIHMFCARKPSLLLSTMRALDNLGLDIQQAVISCFNGFAMDIFRAEQCKEGQDVHPEQIKAVLLDSAGYNGMM

SEQ ID NO: 31273 - protein, 222 aa, Glycine max
  Clone ID: TF_GmC1598_1.pep
MVSVSVPNMRKPRFPTQTAKGSPKNQNFETKTSHGKRSPAHAQDHIMAERKRREKLSQSFIALAALVPGLKKMDKASVLGDAIKYVKELKERLTVLEEQSKKSRAESVVVLNKPDLSGDDDSSSCDESIGADSVSDSLFEVESRVSGKEMLLRIHCQKQKGLLVKLLAEIQSHHLFVANSSVLPFGDSILDITIVAQMGESYNLTTKELVKNLRVAALKILS

SEQ ID NO: 31274 - protein, 357 aa, Glycine max
  Clone ID: TF_GmC19_1.pep
MEQTTLEAIQFNEEIQGLMAAPAPDTVNYFKALLELPSTQAVELLHSPERARKPLRLTPPPNAALIERAAKFSVFAGENSPPPPDLACPSPAAPGARAAWVSVFAGPNATANSNSPEVKRELPETDANPSSTHGGGGAGSVSDLAVENQNLKTAKRKEREKKVKASSKKSKSVAAADEISGDGEKLPYVHVRVRRGQATDSHSLAERARREKINARMKLLQELVPGCNKISGTALVLDKIINHVQSLQNEVEILSMKLAAVNPVIDFNLDSLLATEGVTPMDCNFPPTVAPVMWPEIPQNGNRQQYQQPWPFDALHQPLWGREEDNTNFMTPENSLLSYDSSANSVSLHSNQLKMEL

SEQ ID NO: 31275 - protein, 647 aa, Glycine max
  Clone ID: TF_GmC414_1.pep
NFDLCETSCGYPAKPEKMVPENLKKQLALAVRSIHWSYAIFWTDSTTQPGVLSWGEGYYNGDIKTRKTSQGVELNSDQIGLQRSEQLRELFKSLKTVEVTPQTKRPSAAALSPEDLTDAEWYYLVCMSFIFNIGQGLPGRTLAKGQPIWLNNAHSSDCKIFSRSLLAKSASIETVVCFPFREGVIELGTTEQVPEDLSVIELIKTSFLNSLHANVPNKSVATLKSRNQEGLSYAAFDHNDYNVKSIPEVGYEIANTTSPDGSSNAFQANQPLDETFMIESITNGTSQVQNWQVIDDELSNCVHNSMNSSDCISQTFACPENIASAPKSNNPSDPCARNFQKCNNPKMTLVDPRSDDLHYQRVLSTLIKSSDQLLMGMHLQKFPQESSFVSWRKEQPMDCKWPRAGTSQKLLKKVLFEVPQMHLDGLHESQEENDYKEGMRVEADENGMNHVMSERRRRAKLNERFLTLRSMVPSISKDDKVSILDDAIDYLKKLERRVKELEAHRVVTDIETGTRRSPQDTVERTSDHYFRKNNNGKKPGMKKRKACGVDETEKEINSDALKGSYANDVTVSTSDNEIVIELKCPSKAGRLLEIMEAINSFNIDFSSVQSTEADGNLYLTIKSVLTGPSVATTKRIKQALQKLASKC

SEQ ID NO: 31276 - protein, 246 aa, Glycine max
  Clone ID: TF_GmC371374_1.pep
HQLHWSHCKKDVDFESPEAKKQVRGSTSTKRSRAAEVHNLSERRRRDRINEKMKALQELIPRCNKSDKASMLDEAIEYLKSLQLQVQMMSMGYGMVPMMFPGIQQYMPPMGMGIGMGMGMEMGMGMNRPVMPFPNMLASSTLPAATAAVHLGPRFPMPPFHMPHVATPDSSRMQGANHPDNNMLNSLGTLDPDQSCIPNFTDPYQEAHSHEEAQQQWKQTMNQPNVSKPSTSRGQENPEKHQSGKA

SEQ ID NO: 31277 - protein, 329 aa, Glycine max
  Clone ID: TF_GmC159_1.pep
MDQRKLRDSSNSKPASDAAPQHVTLTSNRFRNSQAAVREREKEKGEGENEDPSAARKVLKADREKLRRDRLNEHFQELGNALDPDRPKNDKATILTETVQMLKDLTAEVNRLKTEHKTLSEESRELMQEKNELREEKTSLKSDIENLNVQYQQRVRIMFPWSAIDPSAVISQPYSYPVPIHIPSAPISIHPSLQPFPFFGNQNPGHIPNPCSMYVPYTTPTSHPPVEPPSMMYASTSHASNQKESGSKSPGHRRSSGAERSSETDDVVTELELKMPGSSSTQQGCTSGGRKGKMKDRTIIGGSASSQYSSSLGLQDSSNSVGDIPKTDN

SEQ ID NO: 31278 - protein, 261 aa, Glycine max
  Clone ID: TF_GmC131137_1.pep
MVLAVTMENYYDSGWHMGNSSWAQCSDHSSSSFAVPTQILPHHVTDSASLQFGEFHSWALPIEGAAEERAISASKSHSQAEKRRRDRINAQLATLRKLIPKSDKMDKAALLGSVIDQVKDLKRKAMDVSRAFTVPTEIDEVSIDYDHVQDESCTKVNKLKDNIVIKASVCCDDRPELFPELIQVLKGLRLTAVKADIASVGGRIKSILVLCSKDREDSVCLATLKQSLKSAVTKIASSSMASSCPARSKRQRFFLPSHCLQ

SEQ ID NO: 31279 - protein, 381 aa, Glycine max
  Clone ID: TF_GmC138935_1.pep
MGDLFHFDKNLSSQDEISLFLRQILLRSSSPSHSMPAGSCTSNAAQQNVNAHHPSFTASQLQDGKILALDSTASFVSGSAACSSFKGHGASAANVSSSSAGVSENENDDYDCESEEGVEAPAEEVPTKAASSRSSSKRSRAAEVHNLSEKRRRGRINEKMKALQNLIPNSNKTDKASMLDEAIEYLKQLQLQVQMLSMRNGLSLHPMCFPEGLQPLQLSQMGMELSERNRFTSLNMSATLPLHQDNNPLHYASNLPNKHNLPNQPSVPYPPYIDNPETSFGLEPRIQTDMKPLQHKGGSSEPIRGEDILQHQQSSGIHSDANTLGGSQVVKEFESGTRLSFPFDTQACEPKDNSNSSQPCIGGRDHSGVIIRNSETNIVGR

SEQ ID NO: 31280 - protein, 57 aa, Glycine max
  Clone ID: TF_6913441.pep
EALDHIMSERNKRQELTSKFIALAAAIPGLKKMDKAHVLREAINYVKQLQERIEDLE

SEQ ID NO: 31281 - protein, 163 aa, Glycine max
  Clone ID: TF_jC-gmXLIB3563P013cc12a1.pep
SGEEGESKVTEQTSNKNGKSNANKNNNRETTSAETSKDNSKGSEVQNQKPEYIHVRARRGQATDSHSLAERVRREKISERMKYLQDLVPGCNKVAGKAGMLDEIINYVQSLQRQVEFLSMKLAAVNPRLDFNLDELFTKEVFPSCAQSFPNIGMPLDMSMSNN

SEQ ID NO: 31282 - protein, 140 aa, Glycine max
  Clone ID: TF_GmC821579_1.pep
FRMAAMQPIHIDPESVKQPKRRNVKISKDPQSVAARHRRERISERIRILQRLVPGGTKMDTASMLDEAIHYVKFLKTQVQSLQRASSANNNIRPLGTSTVNATGIGFPVAMSTTSNSTPYFPLPKPYQARHMENMHDRYD

SEQ ID NO: 31283 - protein, 320 aa, Glycine max
  Clone ID: TF_GmC141926_1.pep
MELSQLGFLEELVAPRRDSWNALSTGFCELLSNGCCWSFDTFLENPTFGAFSAPRFDSPYSSEVSAAYPFAADGFTMPLSELDPGSDEPPPPPPLPPSLEDAEIGFHDNNNKKKNNFEETKVVCKVEEKDREIPLFKIGMCDDGERKPKSKKLEGQPSKNLMAERRRRKRLNDRLSMLRSIVPKISKMDRTSILGDTIDYMKELLERIGKLQEEEGTSQINLLGISREQLKPNEAIFDVERRDQDTRISICCATKPGLLLSTVNTLEAIGLEIQQCVVSSFNDFSVEASCSEVAEQRDCIHPEEIKQALFRNAGFGEKCL

SEQ ID NO: 31284 - protein, 656 aa, Glycine max
  unsure (1)..(656): unsure at all Xaa locations
  Clone ID: TF_GmC2019_1.pep
MNLWTDENSSVMEAFMSSSDLSSIWPSPAPPQSTAVFNQDTLQHRLQALIEGARETWTYAIFWQSSYDYSGSTLLGWGDGYYKGDDDKAKAKAKAKVKVTSAAEQDHRKKVLRELNSLISGSSSSSAASDDVDEEVTDTEWFFLVSMTQSFVNGGGLPXRPSSTPLRCGSPXRPSLCLGLREGXQGHVFGLQTLVCIPSANGVVELGSTELIFQNPDLMNKVKVLFNFSNNNFDMGSSWPATSADQGENDPSSLWLSDPEVRDSINTVAATPSVTVPAQTQGISISKTMQLESSIQTPGSSTLTETPSSIHAIPQNQSVFSRELNFSEYGFDPKTGNNQNHHSLKPESGEILSFGESKRTSYGGVNGNSNSNSHFFSGQSPFVAAADENTNKNNINNNGKTKSPNSRGSNDDGMLSFTSGVILPASNLKSGGGGDSDHSDLEASVVKDPVVEPEKRPRKRGRKPANGREEPLNHVEAERQRREKLNQRFYALRAVVPNVSKMDKASLLGDAISYITELKSKLQTLESDKDGMQKQLEGVKKELEKTTENVSSNHAGNSSSCNNNNKLSNQKLIDVLEMDVKILGWDAMIRIHCSKKNHPGARLLTALMELDLDVHHANVNLVNDMTMLQATVKMGSRFYTQEQLRAALAAKVGDAR

SEQ ID NO: 31285 - protein, 197 aa, Glycine max
  Clone ID: TF_GmC2019_2.pep
KRGRKPANGREEPLNHVEAERQRREKLNQRFYALRAVVPNVSKMDKASLLGDAISYITELKSKLQTLESDKDVLHKQLEGVKKELEKTTDNVSSNHACNNNNNNKLSSNQPALIDLVEMDVKIIGWDAMITITCSKKNHPAATLMTALMELDLDVHYATVTLVNDLMIQQATVKMGSRFYTQEQLRAALSAKVGDVR

SEQ ID NO: 31286 - protein, 305 aa, Glycine max
  Clone ID: TF_GmC294898_1.pep
PDASRASSNGVWTTTLSAEPEAVRDHVPRTSPQNEKGKSEMLEPTTTSSSGGSGSSLGKNCSLSTRNQGQKRKGIDVEESEEQSEDTELKSALGNKSSQRAGLARRNRAAEVHNLSERRRRDRINEKMKALQQLIPHSSKTDKASMLEEAIEYLKSLQLQLQLMWMGSGMAPIMFPGIQHYMSQMGMGMATPPFPPIHNPMQLPRLPLDQSVSASQTPNQTLMSQNPILGAFNYHNQMQNPALSEQYARYMGYHLMQNASQPMNVFRYGPQGVRHSQTMITPSSNSSGNMSGAANIDEAVSGKMG

SEQ ID NO: 31287 - protein, 264 aa, Glycine max
  Clone ID: TF_GmC6836_1.pep
PVPVEILDDHTISCADIGIVAGVQETKKRRINQTQTQKPPRKNDNYVNSEHSDSDCPTLPTATTPTTSEPKKRGRKPILGRETPVNHVEAERQRREKLNHRFYALRAVVPNVSRMDKASLLSDAVAYISELKAKIEYLESQQPRDSSKKVKTEMTDTLDNHSTTTISTVVDQSGPEPRLGPSPLGLEVDVKIVGPDAMVRVQSENVNHPGARLMGALRDLEFQVHHASMSCVNDLMLQDVVVKLPNGMRSEEGLKSAILMRLDQ

SEQ ID NO: 31288 - protein, 194 aa, Glycine max
  Clone ID: TF_GmC301008_1.pep
ARAGYIHVRARRGQATDSHSLAERVRREKISKRMTTLQRLVPGCDKVTGKALVLDEIINYVQSLQNQVEFLSMKLASVNPMFFDSAMDLDTLMVRPDQKLSNIASPSPLPCVAQFRPHQAIAFADTITTPTTTTNSFPTANNDGYLLDYSSSLFLQGHRPNIFEDNGGQFWDVEDQRQKFLHPYRFGNNSGSFN

SEQ ID NO: 31289 - protein, 253 aa, Glycine max
  Clone ID: TF_GmC224511_1.pep
LPFRRFYGRSGCPGRPTRPAQSSLIKKAVELDGARSKTERKSTEACKSHREAERRRRQRINSHLSTLRTLLPNAAKSDKASLLGEVVEHVKRLRKQADDVTCGDSYSSRSGEPGSVRSEAWPFPGECDEVTVSYCDGEDGEPKRVKATVCCGDRTGLNRDVSQAIRSVRAKAVRAEMMTVGGRTKSVVVVEWEKEEEEVGALERALKAVVENRALVGFGMGPVILGQKRGRDCCASPSSEVDSDFLLRNGSFC

SEQ ID NO: 31290 - protein, 221 aa, Glycine max
  Clone ID: TF_GmC2279_5.pep
MGSLGAVNNSIEDAKFSSSRRLKNQPNYSSSGRMSSIAEIGDKGYRESSPDSEAFADGNDFMAGFQVGHWDDTAMMSDNVGGLKRFSEEDSKPFSGLNAVETQNETGQTHAPLAHQLSLPNTSAEIAAIEKFLQFSDSVPCKIRAKRGCATHPRSIAERVRRTKISERMRKLQDLVPNMDKQTNTADMLDLAVDYIKDLQKQVQTLSDCHAKCTCSHEKQQ

SEQ ID NO: 31291 - protein, 265 aa, Glycine max
  Clone ID: TF_GmC2279_8.pep
MEQGSFSMGLRHSGNNSNLTRHSSSPAGLFSQINIENVYAGVRGMGTLGAVNNSIEDAKFSSSRRLKNQPNYSSSGRMSSIAEIGDKGNRESSPDNEAFADGNDFITGFQVGHWDDAAIMSDNVGGLKRFRENDSKPFSGLNAAETQNETGQTHAPLAHQLSLPNTSAEIAAIEKFLQFSDSVPCKIRAKRGCATHPRSIAERVRRTKISERMRKLQDLVPNMDKQTNTADMLDLAVDYIKDLQKQVQTLSDCHAKCTCSHEKQQ

SEQ ID NO: 31292 - protein, 158 aa, Glycine max
  Clone ID: TF_GmC869_1.pep
HSMAAMREMIFRIAVMQPVHIDPESIKPPKRRNVKISKDPQSVAARHRRERISERIRILQRLVPGGTKMDTASMLDEAIHYVKFLKKQVQTLEQAGANTSPHSNTNSPNNHVVGAAGFPLGMSSNYSNNSSVNYSSLLMKGGCQPCQMFGSTSKQLLS

SEQ ID NO: 31293 - protein, 425 aa, Glycine max
  unsure (1)..(425): unsure at all Xaa locations
  Clone ID: TF_GmC1279_1.pep
MESDLQQHPPMFLDHHQQQMNSGLTRYRSAPSSYFSSIIDHEFYEHVFNRPSSPETERMLTRFVNSLGGGDADAEDSLATTQNPPTVVAVKEEVNQQPPDVTSMNNEPLVLQQQQQQQQQQQQSNNMYNYGSSGTQNFYQSTGRPPLPNQMKTGHGSSSNLIRHGSSPAGLFSNINIDITGYAAVVRGMGTMGAAANNTSEEANFSPATRMKNNAPNFSSGLMSSRAEVGNKSNTQNNNAENEGFAESQGNEFIPAGFPVGPWNDSAIMSDNVTGLKRFRDEDVKPFSGGLNAPESQNETGGQQPSSSALAHQLSLPNXLQKLQNTSAEMAAIEKFLQLSDSVPCKIRAKRGCATHPRSIAERVRRTKISERMRKLQDLVPNMDKQTNTADMLDLAVEYIKDLQNQVEALSDNRAKCTCLHKKQQ

SEQ ID NO: 31294 - protein, 196 aa, Glycine max
  Clone ID: TF_GmC1279_3.pep
MSSRAEVGNKSNTQNNNAEGEGFAESQGNEFIPAGFPVGPWNDSAIMSDNVTGLKRFRDEDVKPFSGGLNAPESQNETGGQQPSSSALAHQLSLPNTSAEMAAIEKFLQLSDSVPCKIRAKRGCATHPRSIAERVRRTKISERMRKLQDLVPNMDKQTNTADMLDLAVEYIKDLQNQVQTLSDNRAKCTCSHKKQQ

SEQ ID NO: 31295 - protein, 242 aa, Glycine max
  Clone ID: TF_GmC64817_1.pep
SNSSPPIQQHRSVSWYCCFFCLKPKAIRPRCFSLLPHTRKRLSENQNFEAESPKGHRSYKSPSHVRDHIIAERKRREKLSQSLIALAALIPGLKKMDKASVLGDAIKYVKELQERMRMLEEEDKNRDVESVVMVKKQRLSCCDDGSASHEDEENSERLPRVEARVLEKDVLLRIHCQKQKGLLLNILVEIQNLHLFVVNSSVLPFGDSVLDITIVAQMGTGYNLTINDLVKNLRVATLKSMS

SEQ ID NO: 31296 - protein, 175 aa, Glycine max
  Clone ID: TF_GmC521_1.pep
MRGVVCGDGKRVKTSESGKGEGETSSGKLAEQSGKPPSEPAKQDYIHVRARRGQATDSHSLAERARREKISERMKILQDIVPGCNKVIGKALVLDEIINYIQSLQRQVEFLSMKLEAVNSRLAPRIEVFPPKDFDQQTFDTTGMPFASQATREYSRGSSPEWLHMQVGGGYERAT

SEQ ID NO: 31297 - protein, 229 aa, Glycine max
  Clone ID: TF_GmC949_1.pep
MEPPLINDSTFSSANPSLSEIWPSHFPTDHTPSNKRHLSPSTDCGSNKHIKSSGSGSQDQNGALKAGEVDATSVAGNKLPEQTAKPSSSEQPPKQDYIHVRARRGQATDSHSLAERARREKISERMKILQDIVPGCNKVIGKALVLDEIINYIQSLQHQVEFLSMKLEAVNSRLSMSPTIECFPSKEVGTQPFDLAGIIFGSQPARGYAQGSQPGWLHMQIAGGFEKAT

SEQ ID NO: 31298 - protein, 208 aa, Glycine max
  unsure (1)..(208): unsure at all Xaa locations
  Clone ID: TF_GmC6831_2.pep
MENIGEEYKHYWETNMFLQTQELGSWGLDEALSGYYDSSSPDGAASSAASKNIVSERNRRKKLNERLFALRSVVPNISKMDKASIIKDAIDYIQHLHEQEKIIQAEIMELESGMPKKSPSYDFEQELLPVVLRSKKKRTEQLYDCVTSRNSPIEVLELRVTHMGEKIGVVSLTCSXRTDTMVKLCEVFESFELKIITANITSFSDRLL

SEQ ID NO: 31299 - protein, 118 aa, Glycine max
  unsure (1)..(118): unsure at all Xaa locations
  Clone ID: TF_6847396.pep
KXXFMGENMQVXXXKKPCTSASKAAXXKSNPXXDXQSVAAKNRRERISERLKILQELVPNGSKVDLVTMLEKAISYVKFLQLQVKVLAADEFWPVQGGKAPDISQVRQAIDAILSSQR

SEQ ID NO: 31300 - protein, 158 aa, Glycine max
  unsure (1)..(158): unsure at all Xaa locations
  Clone ID: TF_uC-gmroLIB3259P211c01b1.pep
GVRGAQELPSEGAKGNSENQQKGDQQPISTANKACGKNAKLGSQASDPXGGGVHVRARRGQATNSHSLAERVRREKISERMKFLQDLVPGCSKVTGKAVMLDEIINYVQSLQRQVEFLSMKLATVNPRLDFNIEGLLAKDILQQRPGPSTGLGFPLEY

SEQ ID NO: 31301 - protein, 138 aa, Glycine max
  Clone ID: TF_GmC1356_1.pep
RKQKARVTERQRRQRIADNLKALHELLPNPAEGSQAYVLDDIIDYVKYLQLQIKEQSGSRLLQADSTAIPLVFHEGYGHYINQKMLNEPLEEIMGKLVEDDSAAAVQLLESKGLFLLPMALVDELSEAVQMFGGSALV

SEQ ID NO: 31302 - protein, 396 aa, Glycine max
  Clone ID: TF_GmC133935_1.pep
MSQRVPNCDVDDNNNIPTTTKIPLLPNFNFISHEVPMLGYQAAELPCKKGQPSTYKGSHGNLTSTWDKPRTSGGTLESIVSQHVSENRYKLVTMDALVPCSEQQGTQKAVVSERLDACGKSRFPRVVAQEEVEKRAGVVARGTRGTTTLELGGCKDWSVSGSETCRRELSVTFNSATKGSPENTTSSGKQCTGTTTNDDRDSISHRISQGEVPDEDYKATKVHRSPGSFSRISASSVVHKQAERRRRDKINQRMKELQKLVPNSSKTDKASMLDEVIQYMKQLQAQVQMMNWMKMYTTQMLPITMQQQQQQQLKMSMMMAQMGMGMGMSKDMVMNMNSMNIPGFPPMLPFPSFMPMAPCGDQLQGTPEKSVTMDAYSTMASLYQQLFHPPASSSKN

SEQ ID NO: 31303 - protein, 108 aa, Glycine max
  Clone ID: TF_jC-gmst024100b03a1.pep
MNQKPTVGSPEWHQVRKNNHKEGTCSVERRRREAINEGINQIARLVPNCDKNKGAILQRAIEYINQLHEEKRQMSERWEQSNMTTSHAINEISAQNSKLKVEVNRPGD

SEQ ID NO: 31304 - protein, 203 aa, Glycine max
  Clone ID: TF_GmC1226_3.pep
MRAGKGSQEEDEYEEEEFGSSKKQGTSSAPNANKDGKAIDKASAIRSKHSVTEQRRRSKINERFQILRDLIPHSDQKRDTASFLLEVMEYVQYLQEKVQKYEGSYQGWGQEPLKLMPWRNSHWRVQSFAGQPTAVKNGLGPVSPFPVKFDESNASISPTMLSGTQNTIDPYQSRDIVNKTAERQPDLVNKGMPLPLAMHANMS

SEQ ID NO: 31305 - protein, 244 aa, Glycine max
  Clone ID: TF_GmC6831_1.pep
MENIGEEYKHYWETNMFLQTQELDSWGLDEALSGYYDSSSPDGAASSAASKNIVSERNRRKKLNERLFALRSVVPNISKMDKASIIKDAIEYIQHLHEQEKIIQAEIMELESGMPKKSPSYDFEQEQLPVVLRSKKKRTEQLYDCVTSRNSPIEVLELRVTHMGEKIVVVSLTCSKRTDTMVKLCEVFESLKLKIITANITSFSDRLLKIVFIEANEDEKDHLQIKIQTAIKALNNDPLSPMSI

SEQ ID NO: 31306 - protein, 84 aa, Glycine max
  Clone ID: TF_GmC94732_1.pep
MDFAAFVSHGSYVDKTFLSSDTNQVGITSRNPIQAQEHVIAERKRREKLSQRFIALSAILPGLKKMDKASVLGDAIKYVKQLQE

SEQ ID NO: 31307 - protein, 347 aa, Glycine max
  Clone ID: TF_GmC3871_1.pep
NYPAIVSAKPKTKNQTQTKPTKISPTSLSASCSFCVPNSFSRLYPDSPESTLKPALMANNPSDAPADDFLEQILGLPNFASADSGLSAADVGLAGAATQAPMMLQLNSADANAHLAGAAFHAPVYQLGLSLDQGKGGFMKPEEASASGKRFRDDVVDNRAKNVFHGQPMPTTMPAAPHPPAIRPRVRARRGQATDPHSIAERLRRERIAERIRALQELVPSVNKTDRAAMLDEIVDYVKFLRLQVKVLSMSRLGGAGAVAPLVTDIPLSSVEEEGGEGRNQPAWEKWSNDGTERQVAKLMEENVGAAMQFLQSKALCIMPVSLASAIYQSQPSDTSSIVKPETNPPS

SEQ ID NO: 31308 - protein, 283 aa, Glycine max
  Clone ID: TF_GmC3871_2.pep
MANHPSEAPTDDFLEQILGLSTFASADPAADASPMMLQLNSGDAATHLAATHLAAFHAPPYQLGLSLDQGKGPFLTPEDASGSGKRFRDDVVDTRPKNFFHGQPMPTTVPTAPHPPAVRPRVRARRGQATDPHSIAERLRRERIAERIRALQELVPSVNKTDRAAMLDEIVDYVKFLRLQVKVLSMSRLGGAGAVAPLVTDIPLSSVEEEGGEGRNQPAWEKWSNDGTERQVAKLMEENVGAAMQFLQSKALCIMPVSLASAIYQSQPSGTSSIVKPETNPPS

SEQ ID NO: 31309 - protein, 261 aa, Glycine max
  unsure (1)..(261): unsure at all Xaa locations
  Clone ID: TF_GmC3871_3.pep
ARATKSVQTEEIKNQTQTASCRFCVPNSFSRLNPDSPDSKLKLALMANNPSDAPADDFLEQILGLPTFASADSGLSAADVGLAGAATQSPMMLQLSSADANAHLAGASFHAPVYQLGLSLEQGKGRFMKPDEASASGKRFRDDVVDNRAKHVFHGQPMPTTMPAAPHPPAIRPRVRARRGQATDPHSIAERLRRERIAERIRALQELVPSVNKTDRAAMLDEIVDYVKFLRLQVKVLSMSRXGVGAGAVAPLGTDIPLSSV

SEQ ID NO: 31310 - protein, 439 aa, Glycine max
  Clone ID: TF_GmC3897_1.pep
LEPLEPDYCVRSSLASSAGIQTIVLVPTDMGVVELGSVRMLPESFELLQAVKSVFSTQSPSYQGVSVSTGGNAVFPGLAIGDANKVDGGVSIPKVFVNTIGNRTHFREKLAVRKMEDNRPWPGHGHPDPNGNNLHNNVSFPNVRGNSLHVSSWAVNSDLRQPGPLEIFAPRAPTSSVLAELANVGKQDFRPQRQVQMQIDFTGATSRPSSARPVVGELELSDVEASCREEQQPSFADERKPRKRGRKPANGREAPLNHVEAERQRREKLNQRFYALRSVVPNISKMDKASLLGDAIAYINELQAKVRIMEAEKERFGSTSNDGSVLEAKLRLENQEKKAPDVDIQAFQDEVIVKVSCPLDSHPVSKVIQTFNEAQISVVESKLAAANDTIFHTFVIKSQGPEQLTKDKLIAVFSPTESNSLQPLSQLDSKGIAVSIVHT

SEQ ID NO: 31311 - protein, 347 aa, Glycine max
  Clone ID: TF_GmC8207_1.pep
MRTSHMEISSIRGLPEMGIIEDPNFLHHWQLNSIDTTSLTGAPFGEILQKHSFSDNSNFNPKTSMETSPTGIERPAKQLRNNSWNHNKSQQQTPETQFASCSNLLSFVNSNYTSELGLVKPKVEMACPKIDNNALADMLISQGTLGNQNYIFKASQETKKIKTRPKLSQPQDHIIAERKRREKLSQRFIALSALVPGLKKMDKASVLGEAIKYLKQMQEKVSALEEEQNRKRTVESVVIVKKSQLSSDAEDSSSETGGTFVEALPEIEARFWERNVLIRIHCEKNKGVIEKTISEIEKLHLKVINSSALTFGSFILDITIIAQMDMEFCMTVKDLVRSLRSAFSYFV

SEQ ID NO: 31312 - protein, 266 aa, Glycine max
  Clone ID: TF_GmC126664_1.pep
MDPNHSPPDFTPHLTTLININSNNNNNAVPSSPSNFNFSDPHHYIPASDATTFKQHNINHNNNHTPDFTSSHVEKSVEASKPVPPPRSSSKRSRAAEFHNLSEKRRRSRINEKMKALQNLIPNSNKTDKASMLDEAIEYLKQLQLQVQMLMMRNGLSLHPMSLPGGLRPMIMPQTGLNLDGSNGFQNSTCAIASSSNDESLVRHAFSFPKQCSISNKSIGVPSVKNIATSDTSSTFHPSIKDALYGNMPQPFMDTTKIGKPSPDVS

SEQ ID NO: 31313 - protein, 403 aa, Glycine max
  unsure (1)..(403): unsure at all Xaa locations
  Clone ID: TF_GmC75820_1.pep
GEEGGGEVRRVRVVFDDDDEKVQRMRKGVLQKLHMTFGGSDEDNYAFGLDRVTDTEMFFLASMYFSFPRGLGGPGKCFASGKHLWVSDVLKSSFDYCVRSFLAKSAGIQTVVLVPTDFGVVEMGSVRMVGESFELLQAVKSVFSAQASSLLVPHMVKPIAPLDLVREKRDGSESANALLSGLAIGDKNKNINNHSNNRVEGVGVPKIFGQDLNCSTQFREKLAVRKMEERPRPWGGHPPKVNSIGFPNGVQGSSWGAGQVVRHLGPPEMLAPRLASSGTLPKLANGARHDFVHNNFEQQRPVQMQIDFSGATSRAASGRSIIAESEISDIEATCKEERVSVADDRRPRKRKRXPANGREEPLNHVEADRQRREKLNQRFYALRAVVPXFSKMDTSLLRDAIAP

SEQ ID NO: 31314 - protein, 251 aa, Glycine max
  Clone ID: TF_GmC126039_1.pep
MHHFAMDNSHLLQFLPNTTTTTTTTNTPFFHAAPHTHTMHHPLSTNSSNNTNYYPFHLSQITETPSHHDRALAAMKNHKEAEKRRRERINSHLDHLRTLLPCNSKTDKASLLAKVVQRVKELKQQTSEITELETVPSETDEITVLSTTGGDYASGGGDGRLIFKASLCCEDRSDLIPDLIEILNSLHLKTLKAEMATLGGRTRNVLVVAADKEHSIESIHFLQNSLRSILDRSSSGDRSKRRRGLDRRLMS

SEQ ID NO: 31315 - protein, 435 aa, Glycine max
  Clone ID: TF_GmC42302_1.pep
MSIVYSHAVKYSQGETRMNPEMDSNIGQHCHQQNSGLMRYRSAPSSLLTSLANNNNINNNTTTNGCVNGKAFRSVHNHHQQQRYPPSTSSEMETMLAKLISSNNSEPLQVKEEAVASVSQPPQQHNGYSYGSSPQMMYQTQQIQGLSMPNGSLGNAFDGSFSAVNSLASQNSTQPRLGASTNCNNLIRQKSSPAGFFSNYSVDNAMRDVASFRGCDVSNGQAITSSSGLHGGTLNLSSRPSSCSTRMPQIAENGNEDVEANYVESRNLRNDNINTTKCYMPSFTTDFWDGSAFSASRTASNRGEISFSTSKAMDIQDEDFGYQKVGLTHHLSLPGSSSRMATMEKLYQIQGSVPCKIRAKRGFATHPRSIAERERRTRISARIKKLQDLFPKSDKQTSTADMLDLAVEYIKDLQKQVKILRDTRAFGTSTSNQKH

SEQ ID NO: 31316 - protein, 195 aa, Glycine max
  unsure (1)..(195): unsure at all Xaa locations
  Clone ID: TF_jC-gmro02910073h08a1.pep
LEVHQDTLTYMFDFELYDFVADPNFDQFINLFRGENEDANCDHFGSDLINDCFANNQQQLLSCPANPFDQNNNNNAVNVYDPSSTFSSFSYYDRELKGEGGEELDEEHSSGTMTTTTNNAVGKPKVKTDMSKTLISERRRRGRMKEKLYALRSLVPNITKMDKASIIGDAASYVHDLQARAXKLEAEVAGLEASL

SEQ ID NO: 31317 - protein, 271 aa, Glycine max
  Clone ID: TF_GmC154228_1.pep
MVYSFYDKTSSSSGSDISGLFNPTLHNLGACNDLSSSPHSLVFESDKGELVKCLAAAKVGKSEICEAKALAALKNHSEAERRRRERINGHLATLRGLVPSTEKMDKATLLAEVISQVKELKKNAAEVSKGFLIPKDADEVKVEPYNDHEGGEGSMSYCATICCDFRPEILSDLRQTLDSLPLHLVKAEISTLAGRMKNVFVFTCCKENINNIDFEKCQALASTVHQALCSVMEKASASLDFSPRTSHASKRRRLCFIETSNSTCNHGSCLC

SEQ ID NO: 31318 - protein, 186 aa, Glycine max
  unsure (1)..(186): unsure at all Xaa locations
  Clone ID: TF_LIB4281-033-R1-K1-C5.pep
MANHPSEAPTDDFLEQILGLSTFASADPAADASPMMLQLNSGDAATHLAATHLAAFHAPPYQLGLSLDQGKGPFLTPEDASGSGKRFRDDVVDTRPKNFFHGQPMPTTVPTAPHPPAVRPRVRARRGQATDPHSIAERLRRERIAERIRAXQELVPSVNKTDRAAMLDEIVDYVKFFELQXKVLSM

SEQ ID NO: 31319 - protein, 332 aa, Glycine max
  Clone ID: TF_GmC8965_2.pep
MAGNSGSEGLGDDFFEQILAVPEAGTVGMLQLGSTTGGFRGASGLMPLGLNLEQAAFLRHQVNVDDDVVHVNVDDATIHQHHLTLHNNNTSSSPSSTAPITDRDSMHMRGLFSAFGQLHTPIRPTLPLPPPPRQPQLHLHHHNQQFQGQAAAAPASMAAMPQPPGIRPRVRARRGQATDPHSIAERLRRERIAERMKALQELVPSINKTDRAAMLDEIVDYVKFLRLQVKVLSMSRLGGAGAVAQLVADVPLSAVEGDQDIEGVSNEQAWDKWSNDGTEQQVAKLMEEDVGAAMQFLQSKALCIMPISLASSIFRMPQSEASTGIKPESNSH

SEQ ID NO: 31320 - protein, 231 aa, Glycine max
  Clone ID: TF_GmC227_1.pep
MDMNSSGGACGWLYDYGFDIPVAGSDFMASDSGGFSWGPQSYNFKGPSNMSLEMEYSLDSTVMENGPSKRLRTESCASGSKACREKLRRDKLNERFLELSSILEPGRQPKTDKVALLSDAARVVIQLRNEAERLKEMNDELQAKVKELKGEKNELRDEKNRLKEEKEKLEKQVKLTNIQPSFLPQAPDAKGQVGSHKLIPFIGYPGIAMWQFMSPAAVDTSKDHLLRPPVA

SEQ ID NO: 31321 - protein, 129 aa, Glycine max
  Clone ID: TF_GmC227_3.pep
PLCVFFFYLSPFSLFRLRTESCASGSKACREKLRRDKLNERFLELSSILEPGRQPKTDKVALLSDAARVVIQLRNEAERLKEMNDELQAKVKELKGEKNELRDEKNRLKEEKEKLEKQVKLTNIQPSFL

SEQ ID NO: 31322 - protein, 564 aa, Glycine max
  Clone ID: TF_GmC135879_1.pep
MYMSILKKNVKRQLQNWMLRRHRELLYQKDYQHFIWKIMDKRPMSTGDRPKMHDQTGCFDPNTTGESVPSLKDNFPQTLPPSSPMVVVGNTTTNSINNSLEENLRLSVEELSCNHHNPQHQQDHVSTYASGVTATSIEIPLPQHLGLNMGNSYINNNNNMDNHLVQEVIDAFPYQQSTWDPTIVQELQDMAYANHTEQTQQQQQNEQQFQQFETQNCSQSYNNPSSILDPPYPSPDLLNLLHMPRCSASSLLTNPSICLTNPTQNTPNFQNPMAFLGDLPIGSENTSASSVLYDPLFHLNLPPQPPALRELFQSLPRGYSLPTNSRNGSLFGGGDEMEGDGSQLDMGVLEFNRVTLTPSVGKGRRGKATKHFATEKQRREQLNGKYKILRNLIPSPTKTDRASVVGDAIDYIRELIRTVNELKLLVEKKRYAKDRCKRPKTEEDAAESCNIKPFGDPDGGIRTSWLQRKSKDSEVDVRIIDDDVTIKLFQRKKINCLLFVSKVLDELQLELHHVAGGHVGEYCSFLFNSKIMEGSSVYASAIANRVIDVLDSQYAAAVPHTNSY

SEQ ID NO: 31323 - protein, 194 aa, Glycine max
  Clone ID: TF_jC-gmXLIB3563P001be05a1.pep
RAESARAAREPSLGVTESAAKLGQWTSTERTSQSFSNNRHGGFSSRSSSQTTGQKNQSFIEMMKSARDSNAQDEVLESEETFFLKKEPSSNTQRELRVKVDAKSTDQKPNTPRSKHSATEQRRRSKINDRFQMLRELIPHSDQKRDKASFLLEVVEYIHFLQEKVHKYEGSFQGWSNEPEKLMPWRNNDKPAET

SEQ ID NO: 31324 - protein, 227 aa, Glycine max
  Clone ID: TF_GmC330_3.pep
MENIGEEYGYWPENDMLFQNEDLGSWAIMDEAALSGSGYYDSSSPDGTGASSSVASKNIVSERNRRKKLNDRLFALRAVVPNITKMDKASIIKDAIEYIQHLHDQEKRIQAEILDLESGNKLKNPTYEFDQDLPILLRSKKKRTEQLFDSVSSRNSPIEIIDLRVTYMGEKTFVVSLTCSKRTDTMVKLCAVFESLKLKVITANITSFSGTLLKTVFIQVSLPFCPS

SEQ ID NO: 31325 - protein, 153 aa, Glycine max
  Clone ID: TF_jC-gmst024125b09a1.pep
LEGQATCSHSLAERVRREKISERMKTLQRLVPGCDKVTGKALVLDEIINYVQSLQNQVEFLSMKLALVNPMFYDLAIDLDTLMVRPDQKLNYNIASPSPCLAQFRPNQAIAFADTTTTNSFPTANNGDYLLDYSSSLFLQGPRSNLLFEYNGQ

SEQ ID NO: 31326 - protein, 321 aa, Glycine max
  unsure (1)..(321): unsure at all Xaa locations
  Clone ID: TF_GmC1312_1.pep
VHEDTLKYMNDFELYDFVADSNFDQFINLIRGENEDANCDHFGSDLINDCFVNNQQQPLSSPANPFDQNNNNNNNDAVNVYDPSSTFSSFSCFDGELKGEGEEENDGEHSSGTTTTTTKNADGKLKLKTDRSKTLISERRRRGRMKEKLYALRSLVPNITKMDKASIIGDAVSYVHDLQAQARKLKAEVAGLEASLLVSENYQGSINNPKNVQVMARNISHPNCKKIMQVEXFQVEERGYLAKIVCNKGEGVAASLYRALESLAGFNVQNSNLATVGESFLLTFTLNVKGTEQEINLPNLKLWVTGALLNQGFEFVASFPA

SEQ ID NO: 31327 - protein, 157 aa, Glycine max
  Clone ID: TF_GmC544_1.pep
MQPTSGGGGLARFRSAPASWLESVLLKEEEEEEDPLSFTQLLSTIDDAPSHSQHQLYGAALSNKDKTPEIFMLEDSVPCRVRAKRGCATHPRSIAERVRRTRISDRIRKLQELVPNMDKQTNTADMLDEAVAYVKFLQKQIEELSEHQRRCKCVVQE

SEQ ID NO: 31328 - protein, 383 aa, Glycine max
  Clone ID: TF_GmC7716_1.pep
MDSNSRYQVQQQHQHNSGLPRFRSAPPANLKQQGEAANNNGSAWEGSEPLLRFLNSGDTHDTTSSPTLREFVDNKVSNNSKPAKESSSPLSRMNSQHSYSTSMLPSRSTVASAMMMFSSGKNQSAASFDASLLRQSSFPAGHFSNNISFQNGYDTMKGVGNYSGVNGNDGELSLSMNRMKNQISFSSISPSSSLGVLSPTSKIGTEGIRVTSTEDGRQGGSNGDARYFGPGFSYASWNEPSHHKRQRSSNDELLSDSQDGELGNQVQTLSHHLSLPRTSSDMFAMDSLLQFSDSVPCKIRAKRGFATHPRSIAERVRRSRISERIRKLQELVPNMDKQTSTAEMLDLAVDYIKDLQKEFKTLNDKRAKCKCINMQKSEADQVA

SEQ ID NO: 31329 - protein, 184 aa, Glycine max
  Clone ID: TF_GmC142014_1.pep
MVALFSPPVFSTKGWLLEEDPLSYDVSSEYSFPYQFYSPQTQIELEIERSTSPSPEDPAMVKKLSHNASERDRRKKVNHLVSSLRSLLPVADQTKKMSIPTTVSRVIKYIPELQQQVEALSKKKEDLLCRISRQLQGDAVNKESQRRISHHNSDFAVSTSRLNDCEAVVHISSYEAHKAPLSDI

SEQ ID NO: 31330 - protein, 288 aa, Glycine max
  Clone ID: TF_GmC85409_1.pep
MNSVEEQLEGENSVDPGELSWENHSYSYLTKESTTLLSNSSSLEEINTGFDMTSLKQDASPQKPKSCILSFEDSTLVPINPKKTCQIYDHGEHSKETQEKPHNRKPLKRGRRFSQTLDHILAERKRRENISRMFIALSALIPDLKKMDKASVLSNAIEYVKYLQQHVKDLEQENKKRKTESLGCFKINKTCDDKPIKKCPKVEARVSGKDVLIRVTCEKQKDIVLKLLAKLEAHNLCIVCSNVLPFGNSALSITSIAMMDHEFSMTVDTYDLVKMLTEELLECCKLQR

SEQ ID NO: 31331 - protein, 339 aa, Glycine max
  Clone ID: TF_GmC298_2.pep
MARSAKGHQDEFDEDDEEELLTGNISSKVKVDEPSTGKRVNPHRSKHSETEQRRRSKINERFQVLRDLIPQNDQKRDKASFLLEVIEYIQFLQEKLQIYEQTYEGWNQEPTKLTPWRNNHGPAENTTDPSQATQNGSVDEKNNNVSPLLPKNVQNPIESDFSMTTIQKGNIPGSTTEAVPLPMQMRLDMFDPVVSSSMATQHLLEPVSNVNMLSHTQPQLWLDKRNKGNYILPHNDTMKEQEELVNESGSDSISSAYSQGILDSLTQALHSSGVDMSQTNVSVQIDVGRQENAGLIPSASTSKGHENQSVSNPAIARSGVDYCNIDSEQSSKRLRQEAS

SEQ ID NO: 31332 - protein, 175 aa, Glycine max
  Clone ID: TF_15663066.pep
NLENLPKRLKSSIEVPKTSRNAKSRKNSKSASTSNDEDDRSLSLQVQRNNSCFSQSDSNAYLEPNGGASKDPAPPNLDRKSRATTSAAADPQSLYARKRRERINERLRILQNLVPNGTKVDISTMLEEAVQYVKFLQLQIKLLSSEDLWMYAPIVYNGINIGLDLGISPTKGRSM

SEQ ID NO: 31333 - protein, 422 aa, Glycine max
  Clone ID: TF_GmC3662_176.pep
MGFQHGNESILTCPTSGLSGANVNVSEMAISSVSIAKPSDVVNPFIASSAWDPLVSLSQVQSFGGSSMVSHSEFANSNSSYPLVLDNQGISNTSHLVQYMSDSNLGGMVPKVHSYASGGFSEMVGAGSFCQHRSADMANTGYPIHYNPIKEAPINGEQSQVEDSIPEEEAPGSAPSGNRRKRGLDHNSTFSPNKNAEGDAVNDSPGKASDGSKEHEKRPKVEQNNGADVRGKQSVKQAKDNNSQSGEAPKENFIHVRARRGQATNSHSLAERVRREKISERMRLLQELVPGCNKITGKAVMLDEIINYVQSLQQQVEFLSMKLATVNPELNFDVDRILSKDILQSRIGHGIGAYGPGINSSHTFPNGSFHGTLAGMSSTSSQFPPLPQNVLDHEFQSFYGIGYDSNTALDNLGPNGRLKTEL

SEQ ID NO: 31334 - protein, 220 aa, Glycine max
  Clone ID: TF_GmC1728_1.pep
MDSLEDSGCWDFLDYSFIDQAPPDFLWSNNNNSVSTEIDIPGDAVACQENTKKRGRTDSCFKAGSKACREKLRRERLNERFCDLSSVLEPGRPVRTDKPAILDDAIRVLSQLKTEAQELKKTNEKLLEEIKCLKAEKNELREEKLVLKADKERIEKQLKALPVAPAGFMAPPVAAAAAAYQAGVNKMAVYPNYGYIPMWQYLPQSVRDTSHDHELRPPAA

SEQ ID NO: 31335 - protein, 450 aa, Glycine max
  Clone ID: TF_GmC1767_1.pep
MSVMYSPVLNYSDVEHQLRKNQDMDSSIGHPQQHCHQPNSGLLRYCSAPSSLLASLIDNTIHGCVNEESFTSENHHHQQQQQQQHYLPSTSSEMETMLSKLLPSNNGWSNSEALQEFGGKPVKQEIGESIPQEPPQQNGYSYGGSQLIYQSQQIQGLPNGGSSSASGSAFDGSFGVVHSMASEDSIQSKMGIRNCSNLFRQKSSPAAFFSIENDLAALREVGSFKADDVSNGLVTASTGGLHSSHTFSSRPSSCLKRLPQIAENGNESLEENCDQSRNLVNDNGSSKCYIPSFTNELWESSAFNAPKTENEDEIMFSTSNILESQEADFSFQNLGLTHHLSLPSSSTKMSSIEKFLQIQGSVPCKIRAKRGFATHPRSIAERVRRTRISERIKKLQDLFPKSEKQTSTADMLDLAVEYIKDLQQKVKILSDCKAKCKCTSNEKHYTRTCA

SEQ ID NO: 31336 - protein, 647 aa, Glycine max
  Clone ID: TF_GmC5053_1.pep
MTEYRMNLWTDDNSSVMEAFMSSSDLSSLWLPTPQSAASTTTPGLETTRAPPPQSHSLLNQETLQQRLQTLIEGARESWTYAIFWQSCYDYSSGTSLLGWGDGYYKGEEDKDKVKTKAPKTRSSAEQDHRKKVLRELNSLISGPSASADDIDEEVTDTEWFFLVSMTQSFVNGSGLPGQAFFNSSPVWVAGPERLSESVCERAHQGQMFGLQTLVCIPSANGVVELASAEVIFQNPDLMNKVRDLFNFNNNNNNNNPETCSWALNCVATTDQGENDPSSLWLNPEIKDSSTVSPPNSTVNKTMHFETPGSSTLTETPSAAAAVHVPNSKSQGFFPRELNFSNSLKPESGEILSFGESKKSSYNGAFFPGVVAVEENNNNNKNKKKRSPVVSRSSIDDGMLSFTSLPAANIKSVNGACVGAGDSDHSDLEASVAKQVVEPEKRPRKRGRKPANGREEPLNHVEAERQRREKLNQRFYALRAVVPNVSKMDKASLLGDAILYINELKSKLNVLDSEKTELEKQLDSTKKELELATKNPPPPPPPPPPPGPPPSNSVEPKKTTSKLADLELEVKIIGWDAMVRIQCSKKNHPAARLMAALKDLDLEVHHASVSVVNDLMIQQATVNMGNKFYTQEQLLSALSSKVGDELR

SEQ ID NO: 31337 - protein, 190 aa, Glycine max
  Clone ID: TF_GmC385855_1.pep
MPQTQPKKKVRRSCETRHHIIAERKRRQELTGSIIALSATIPGLKKMDKAYVLREAVNYTKQLQERVKELENQNKVDSATFIRKSEASSDKNTGNCETNKEISLFEVEARVLDEEVLIGIHCEKQKDIVFKIHALLGKLHLSTTSSTVLPFGTSTLIINIIAQMNGENSMTMHDLVKKLRDYLLEVYDMQ

SEQ ID NO: 31338 - protein, 205 aa, Glycine max
  Clone ID: TF_GmC220815_1.pep
MIKVGDSCFSIVQNSSPIEEGGFRLISDTYQPECKKSRWDMSSSSNNINFQQPNSSISSSIEEPDPEAIAQMKEMIYRAAAFRPVNFGLEVAEKPKRKNVKISTDPQTVAARHRRERINEKIRVLQKLVPGGSKMDTASMLDEAANYLKFLRSQVKALESLGNKVDAMNCPPTSIAFSFNPSFPMQTPPLCHIHHSHGVKQNNPP

SEQ ID NO: 31339 - protein, 335 aa, Glycine max
  Clone ID: TF_GmC1226_1.pep
MRAGKGSQEEDEYEEEEFGSSKKQGTSSAPNTNKDGKAIDKASAIRSKHSVTEQRRRSKINERFQILRDLIPHSDQKRDTASFLLEVIEYVQYLQEKVQKYEGSYQGWGQEPSKLMPWRNSHWRVQSFAGQPTAVKNGLGPVSPFPGKFDESNVSISPTMLNGSQNTIDPDQSRDIVNKTAERQPDLVSKGIPLPLAMHANMSVPVRSDGVLAHPLQGTVSNAQSTECPTTSEPQNQQDELSVEGGTISISSAYSQGLLNNLTQALQSAGLDLSQASISVQINLGKRANKGLNCGTSSLKHHDNPSSNNQTIAHFRDAGSGEDSDQAQKRMKTYK

SEQ ID NO: 31340 - protein, 118 aa, Glycine max
  unsure (1)..(118): unsure at all Xaa locations
  Clone ID: TF_jC-gmXLIB3563P042ag07d1.pep
MRAGKGSQEEDEYEEEEFGSSKKQGTSSAPNTNKDGKAIDKASAIRSKHSVTEQRRRSKINERFQILRDLIPHSDQKRDTASFLLEVIEYVQYLQEKVXKYEGSYQGWGQEPSKLMPW

SEQ ID NO: 31341 - protein, 361 aa, Glycine max
  Clone ID: TF_GmC1598_2.pep
MDDYNLFPDECPLNLNLFDDQEFLSQDIASALQEQTQTLQQSLSSECPSKTVSNSSTDETTFDFERPAKLLKTTTSSSCCNSDSSTITKSLSPKLSPSSSFSSFQSQILSFDNPNPTSSSNTTTQFYGFDCTLNPTQNEMVSVSVPNMREPRFPTQTAEGSPKYQNFETKTSHAKRSPAHAQDHIMAERKRREKLSQSFIALAALVPGLKKMDKASVLGDAIEYVKELKERLTVLEEQSKKTRAESIVVLNKPDLSGDNDSSSCDESIDADSVSDSLFEVESRVSGKEMLLKIHCQKQRGLLVKLLAEIQSNHLFVANSSVLPFGNSILDITIVAQMGESYNLTTKELAKNLRVAALKILS

SEQ ID NO: 31342 - protein, 285 aa, Glycine max
  Clone ID: TF_GmC284_1.pep
TLPPKVPCTAIQSHASNHAQRVPNKHQEQSVGAIQASGDSDAGEAPANGAHAGPNPGQPKQRVRARRGQATDPHSIAERLRRERIAERMKALQELVPNANKTDKASMLDEIIDYVKFLQLQVKVLSMSRLGGAAAVAPLVADMSSEGGGDCIQANGKSNGGGAQASTTNTNTNQTTATTTSNDSLTMTEHQVAKLMEEDMGSAMQYLQGKGLCLMPISLATAISTATCPTRNVNVNPLINAAAGATHFPTAANPAGEGPSSPSMSVLTVQSAIAGNDGAASVSKP

SEQ ID NO: 31343 - protein, 246 aa, Glycine max
  Clone ID: TF_GmC284_2.pep
MRRPQGHSHSEPEPPHRARSPPTPGVSASTGSSGSLQPNNQTHHFQQHPQPQGQSFGASAPANGGGSGQPKQRVRARRGQATDPHSIAERLRRERIAERMKALQELVPNANKTDKASMLDEIIDYVKFLQLQVKVLSMSRLGGAAAVAPLVAEGGGDCIQAKRSNSNDSLAMTEQQVAKLMEEDMGSAMQYLQGKGLCLMPISLASAISKATCHPFINGDGPSSPRMSALTLANAVVKDAASVSKS

SEQ ID NO: 31344 - protein, 336 aa, Glycine max
  unsure (1)..(336): unsure at all Xaa locations
  Clone ID: TF_GmC284_3.pep
MLQHQLLRDSGLLNMPLSLPGNDVVVDASTFESPNPSGKASVQTLYNGFAGSLHGVGQSSNQTQHFQHPQGSSNPMQGQNFGAVPAGGGSATNQAPASGAAAGGAPAQPRQRVRARRGQATDPHSIAERLRRERIAERMKALQELVPNANKTDKASMLDEIIDYVKFLQLQVKVLSMSRLGGAAAVAPLVADMSSEGGGECIQANGKSNGGGAHAPNTNSSQTTATTTSNDSLTMSEHQVAKLMEEDMGSAMQYLQGKGCLMPIXLPRNLATCHTRNVTVNVPLINAAAAAQIPTAANPAGDGPSSPSMSVLTVQSAVAVNDGSAAVKDAASVSKP

SEQ ID NO: 31345 - protein, 212 aa, Glycine max
  Clone ID: TF_GmC1808_1.pep
MSNSNWVLDYDYLDNIPLTTLEPPNFSWSSSSPPPTLSVELDDSFGISDGLKENRSRKRLRSSDSKACREKMRRDRLNDRFMELGSILDPRKPLKMDKAVILSDAVRVVSQLREEAQKLRESTENLQEKINALKDEKNELRDEKQRLKVEKENLEQKVKALSSQPSFLAAAGQVVGSKLVPFMGYPGVAMWQFLSPAAVDTSQDHVLRPPVA

SEQ ID NO: 31346 - protein, 249 aa, Glycine max
  Clone ID: TF_GmC330_2.pep
MENIGEDQYGYLPETDLFFPNEDLGSWAIMDGEAVSWYYDSSSPDGTGASSSVASKNIVSERNRRKKLNDRLLALRAVVPNITKMDKASIIKDAIEYIQHLHEQEKRIQAEILDLESRNKFKNPTYEFDQDLPILLRSKKKKTEHLFDSLSSRNSPSIEIIELRVTYMREKTFVVNLTCSKRTDTMVKLCAVFESLKLKVITANITSFSGTLLKKTVFIQADEEEKDFLHIKIQTAISALNDPLSPMSI

SEQ ID NO: 31347 - protein, 518 aa, Glycine max
  Clone ID: TF_GmC11360_1.pep
MMIQKMFDPTRSGMTRSSSHVASIYDNDFLELVWENGEIVVRGGSSNRSRKTNDERIHEDASINKRTRLNPLLYSLEDHFPPQRDSDMSTSHQSNNGQDSCQSSQSKNSCKLHEEFANLLKPVSTGNSHLQQCLPSSPLKKQRTDSTQTPRPAKVNFSNFSIPAVFLKSTTTTTTNNYQGNSATQQTKNHSSPARVEEIEALKVDKSAKETQCFQKQTSLTVERSTKLPTPAVDEHSGCEKTTEGVLGIHRSQGQTSTSEALRAKAKAYNNNNINMCHEPLLASSSVCSLGASNDPNLGFRKHEDTDDSTYLSDNDGEPEDMVKQDREGNRVKRSRNPEVHNLSEKKRREKINKKMRTLKDLIPNCNKVDKASMLDDAIDYLKTLKLQLQANFQIMSMGSGLWPLMMGFRPPQLPIPPLSAITDNRLIQMFGSPNQIPPMPMPHAPFFPIIGNSATQSHLANNTTTTAAATTNLAEHLANSLHGNATKLAPPSQISFQHHHTSTSTPTLATPFIFPQK

SEQ ID NO: 31348 - protein, 303 aa, Glycine max
  Clone ID: TF_GmC1654_1.pep
MTLETLQSNEFSNFIIYDTISATPFSSHGSPEASFLESFVNYQEQHDHPTFDNCAMRTRKREASEPESIGRRQNSVAVQGRKKRRRKPRVCKNTEEAETQRITHITVERNRRKQMNEHLAVLRSLMPESYVQRGDQASIVGGAIEFVKELEHLLQSLEARKLQLLHQEVAQTNENTAISKLMQPPFAHCFSYPQYTWSQTPNKYTSKTKAAIADIEVTLIETHANLRILTRRSSHGQLTKLVAGFQTLCLTVLHLNVTTIDPLVFYSFSAKVEEGFQLGSVDGIATAVHHLLARIEEEASLCC

SEQ ID NO: 31349 - protein, 504 aa, Glycine max
  unsure (1)..(504): unsure at all Xaa locations
  Clone ID: TF_GmC277_1.pep
MVGEKFCVSEDDKGVLESVLGAEAVAFFISALSNNVFSRVVAPSAGADPALRQRLCQLVEGSKWNYAVFWQVAGLKSEGSGVPCLDGHCSDPKGERNGVGKEDEQEXRKKVLQKLDACFGGSVLKDANHVRLDRVSDLLMFYLSSMCYIFGFDSLCGPGSSFKSGKLIWASDAAGCLNQLESRSFMGKLAGLHTVVFVPLKSGVVELGSFEMVPEEQGVVEMVRTAFGESSPGQAKVFPKIFGHELSLGDTKSQSITISFSPKVEDDPGFTSDSYEVQALGVNHAYGNSSNGTLGDGNEGTLFPQLNQMMAGNFNAQARVPCLDLGNEDSSSIHADERKPKKRGRKPANGREEPLNHVEAERQRREKLNQRFYALRAVVPNISKMDKASLLGDAITFITDLQMKIKVLEAEKNMGNNKDQKLSLPDMDFQEREDDTVVTVRCPLDIHPVSNVVKTFREHQIVAQDSNVSTADDKIIHTFSIRTEGGEAAAIQLKEKLEASLSKS

SEQ ID NO: 31350 - protein, 368 aa, Glycine max
  Clone ID: TF_GmC1376_1.pep
MTTEGGPNTSLLVWFFPFIVFLLKVLKLFCYVFARGRERAMALEAVVFPQSQDPFGGSGYGSVNNKDFYNCTLLAATSPNSWGDYEQHININKEEEQGGASISTFQPESNYPYGNWTSSSSSMLPHFNNELQETTTTDPSNTLDSLNTRPKRRRAKSRKNKEEIENQRMTHIAVERNRRKQMNEYLSVLRSLMPDSYIQRGDQASIIGGAINFVKELEQRMHFLGAQKEGEGKSEAGGATNMPFSEFFTFPQYSTSGGGGCSDNSAAVGEDVGEVKCGIADIEVTMVESHANLKIRSKKRPKQLLKLVSGLHTMRLTILHLNVTTTGEVVLYSLSVKVEDDCKLGSVDDIAAAVYQMLDKIQQEAMLN

SEQ ID NO: 31351 - protein, 250 aa, Glycine max
  unsure (1)..(250): unsure at all Xaa locations
  Clone ID: TF_GmC3897_2.pep
VRSSLANSAGIQTIVLVPTDLGVVELGSVRMLPESFELLQAVKSVFSTPIPKXFGEHNSHQTHFREKLAVRKMEDNRPWNNNNVSFPNVRSNGLHVSSCWPVNSGLRQPAPRVVAELANGVRQDLRLSNSYEPQRQVQMQIDFSGGTSRPSDVEASCKEEQPSVADERKPRKRXRKPANGREEPLNHVEAERQRREKLNQRFYALRSVVPNIXKMDKASLLGDTIAYINELQAKVKIMEAERERFESISN

SEQ ID NO: 31352 - protein, 104 aa, Glycine max
  Clone ID: TF_12488088.pep
VRISSDPQTVAARQRRERISERIRVLQKIVPGGSKMDTASMLDEAANYLKFLRSQVKALENLGNKLDTMNCPPTNIAFSFNPSFPIQTHFPMQNPSSHIQYSKG

SEQ ID NO: 31353 - protein, 328 aa, Glycine max
  Clone ID: TF_GmC693_1.pep
MCLPEGERGMALEAVVYPQPQDPFGHGIKDPSYNYNNLLEGGGGNWGYADFNLEKEDRTCVPFLANQTENYPYGEWNCSPSPPSMLPQLNIASNPQSSETSNTQNNLDSSVSTPARPKRRRTKSRKNKEEIENQRMTHIAVERNRRKQMNEYLSVLRSLMPESYVQRGDQASIIGGAINFVKELEQRLQFLGAQKEKEAKSDVLFSEFFSFPQYSTSASGGCDNSTAMSEQKSEAQSGIADIEVTMVESHANLKIRSKKRPKQLLKIVSSLHGMRLTILHLNVTTTGEIVLYSLSVKVEEDCKLGSVDEIAAAVYQILDRIQQETISN

SEQ ID NO: 31354 - protein, 195 aa, Glycine max
  unsure (1)..(195): unsure at all Xaa locations
  Clone ID: TF_GmC693_2.pep
MCLPEGERGMALEAVVYPQPQDPFGYGIKDPSYNYNNLLEGGGGNWGFEKEEQGFVTFLENQTENYPYGEWNCSPSPPSMLPHLNASNPQSSETSNIHNNLDSSISTPARPKRRRTKSRKNKEEIENQRMTHIAVERNRRKQMNEYLSVLRSLMPESYVQRGDQASIIGGAINFVKELEQRLQXLGWSERERGEI

SEQ ID NO: 31355 - protein, 201 aa, Glycine max
  Clone ID: TF_GmC25403_2.pep
MVVDKLETGEQVTQKVNIPVDKKRRTRNGSSFTSNPQSKDTATEGKNKKQRKNNGGLKEEDKAKEEKKDQRKCPEEPPTGYIHVRARRGQATDSHSLAERVRREKISERMKVLQRLVPGCDKVTGKALMLDEIINYVQSLQNQVEFLSMKLASVNPMFYDLATDLDTLLVRPEKLNSMASPSPLPSMSHCNSPNTQATTFC

SEQ ID NO: 31356 - protein, 286 aa, Glycine max
  unsure (1)..(286): unsure at all Xaa locations
  Clone ID: TF_GmC6805_1.pep
MYPSSSSSSSSSSQSMTQAGLTRYGSAPGSLLTSTVDSLIGGSRPSPYFSGESSESPCKEQRSFHNHPPFFASSLLRQKSSPAGFLSHLSNHHGVXSPSPPGGLSNSNSNSNCSLLKSQLSFTHESLSNTVNVDPSSTTFGMDPWDNNSIAFSATSTKRSKTNTNDPDILHSLNSALESQFNLPHTSLEMSTVDKLLHIPEDSVPCKIRAKRGCATHPRSIAERERRTRISGKLKKLQDLVPNMDKQTSYADMLDLAVQHIKGLQTQVQKLHKEMENCTCGCKQSK

SEQ ID NO: 31357 - protein, 233 aa, Glycine max
  Clone ID: TF_GmC191104_1.pep
RPTRPRTRGSGLNYESDEQNESNGLKLSENGGDNKGKKKGLPAKNLMAERRRRKKLNDRLYMLRSVVPKISKMDRASILGDAIDYLKELLQRINDLHHELESTPPGSSLTPSSSTSFQPLTPTLPTLPCRVKEELYPGTLPSPKNQAAKVEVRVREGRTVNIHMFCTRRPGLLLSTMKALDNLGLDVQQAVISCFNGFALDVFKAEQCREGQDVLPEQIKAVLSDSAGFHGMM

SEQ ID NO: 31358 - protein, 410 aa, Glycine max
  Clone ID: TF_GmC584477_1.pep
MALSKDQRIPHDSSLSSKVQNCVFSETSVEITSMTVHRVNEYHKSVLEEEDGSQTTNGLSNDSAVTRSPPLCGSRKDYAYKGTNYQLEEAVSLIDFKGYSNILQASGSLLSFQQNKMVPLNCYLKDNGQKEYCVWENNLHQGHNHWNQTSPRSTRDMRLVENLNCFQTSSGYSPIVNNAKEKQHGQSSSGWLYSAPTIPNDISSLHKLGAQESVLQKRPSMGENMKAAKKQCSTESKTPKHKSSPSKDPQSVAAKNRRERISERLKILQELVPNGSKVDLVTMLEKAISYVKFLQLQVKVLATDEFWPVQGGKPPEISQVKEVIDVILSSQRERSSCSKIQEDINHANLSQYQRNYAAAIAGKNKSDKIINCNLTFLQIDNSRMSCYPRSSHDGPCNSLKVRVGYFLARF

SEQ ID NO: 31359 - protein, 334 aa, Glycine max
  Clone ID: TF_GmC21758_1.pep
MELSQLGFLDELLAPRKDTTWSNALSTGLNELLLPSGWSFDSFDENQGLATLNPSFAAFSTPLDHRFECPYGSEAAYPFVDGFTLPELDSSYTRNDESAPLLPQEDNPSLEDEEFGFLGSDNQSLEQAKIGCKIEEQVTEIPVFNMGLCGEKKPKSKKLEGHPSKNLMAERRRRKRLNDRLSMLRSIVPKISKMDRTSILGDTIDYMKELLERIGKLQEEEIEEGTNQINLLGISKELKPNEVMVRNSPKFDVERRDQDTRISICCATKPGLLLSTVNTLEALGLEIHQCVISSFNDFSMQASCSGAAEQRNCMNQEEIKQALFRNAGYGGRCL

SEQ ID NO: 31360 - protein, 341 aa, Glycine max
  Clone ID: TF_GmC18720_1.pep
MEESWENWHLHMETGCENDFLGKCHGTDDDEFFRDILQQPPPAAFSSESESDHSFLAVQNTSSIPNDGAVLSPRNYLVKSSSSNSLVSQNASKRPRRLSSPRTYILSFDNSTMVPATPETRPRSSNNSPLPAKRALESPGPVARRPNQGAKKIRTSSQTIDHIMAERRRRQELTERFIALSATIPGLNKTDKASVLRAAIDYVKQLQERVQELEKQDKKRSTESVIFIKKPDPNGNDEDTTSTETNCSILPEMEARVMGKEVLIEIHCEKENGVELKILDHLENLHLSVTGSSVLPFGNSALCITITTQMGDGYQMTVNDLVKNLRQLFSKSHVLSDSDPY

SEQ ID NO: 31361 - protein, 346 aa, Glycine max
  Clone ID: TF_GmC5806_1.pep
MIQEDQGQCSSQAINNYHQAYQEQLLLQQQMQQQQQNNDIFGGGGGLNMYPGAEVSPIMNHHHQPWSMTMPHHHHHHQVHDPFLVPPQPSPYASLFNRRGPSLHQFAYDHHGSSSDHLRIISESLVGPVVQPGSAVPFGLQTELAKMTAQEIMEAKALAASKSHSEAERRRRERINNHLAKLRSLLPSTTKTDKASLLAEVIQHVKELKRQTSLIAETSPVPTEADELTVVDEADEDGNSVIKASLCCEDRSDLFPELIKTLKALRLRTLKAEITTLGGRVKNVLFITGEETDSSSSEDHSQQQQQCCISSIQEALKAVMEKSVGDHHESASANIKRQRTNIISMS

SEQ ID NO: 31362 - protein, 216 aa, Glycine max
  Clone ID: TF_GmC5806_2.pep
MIQEDQGQCSSQAINNYHQAYQEQLLLQQQMQQQQQQQQQNNDIFGGGLNMYPGGEVSQIMHHHHHQPWSMTMPHHHHHHHQVHDPFLVPPQTSPYASLFNRRGPSLQFAYDHGSSSDHLRIISESFVGPVVQPGSAPFGLQTELAKMTAQEIMEAKALAASKSHSEAERRRRERINNHLAKLRSLLPSTTKTDKASLLAEVIQHVKELKRQTSLI

SEQ ID NO: 31363 - protein, 208 aa, Glycine max
  Clone ID: TF_GmC886_1.pep
LLQRSFLPLLSSFFPVEKLLSSRFFKVGCDTSDKAPMLDEAISYLKSLQYDEQMLSMGCGMVPVMFPGIQQYMPAMGMGVGMGMGMGMGMNRPVMPFPNMLPGSALPAATAAAAHLGPRFSMPPFHMPHVPAPDSSRMQAANQSDNNMVTSAGPPDPNQSRIPNFTDPYQQYLGPHQMQFQLIQNQAMNQPNVSKPSNNGGPANPENH

SEQ ID NO: 31364 - protein, 313 aa, Glycine max
  unsure (1)..(313): unsure at all Xaa locations
  Clone ID: TF_GmC256128_1.pep
QAGHVGPRHVHVGCSTRVGSCCGGRGRRGMRRLGGIRAXSGSATFGRDSKHVTLDTCDREFGVGSTSTSINSLENTSSAKHCTKTTTVDDHDSVSHSKPVGEDQDEGKKKRANGKSSVSTKRSRAAAIHNQSERKRRDKINQRMKTLQKLVPNSSKSDKASMLDEVIEYLKQLQAQLQMINRINMSSMMLPLTMQQQLQMSMMSPMGMGLGMGMGMGMGMGMDMNSMNRAHIPGIPPVLHPSAFMPMAASWDAAVAAAAGGGDRLQGTPASVMPDPLSTIFGCQSQPMTMDAYSRLAAMYQQLHQPPTSGSKN

SEQ ID NO: 31365 - protein, 458 aa, Glycine max
  unsure (1)..(458): unsure at all Xaa locations
  Clone ID: TF_GmC993_1.pep
MSTELNANSTFKTIKSCDINTEQDFSMENRILSDILQSHEAFNYNMSRKDFVLPELDGFGSSIGAGSDEIEISPHSQPLVGASSYINCNNNSTNTSCYSTPLSSSPKGMPLSLGTSTSSNSTVTEFSADPGFAERAAKLSCFGSRSFXSCRNTQLSLNNAELGLISSPLVENGKKQLPRVSSSPSLKVLGSQMDTGEKPSPYVNSRKRKGPSKGKAKETSTSTNPPMAAEASDDSNAKRSKPNEGEGNENGHKKAEEALKGGQATDSHSLAERVRREKISERMKLLQDLVPGCNKVTGKALMLDEIINYVQSLQRQVEFLSMKLASVNTRLDFSIESLISKDIFQSNNSLAHPIFLIDSSAPPFYGQHPQPNPAVHNNIPNGTMTHNSVDPLDTGMWIPGFGMHLPHLNDFNEGGFQYPKPFSEDDLHTIIQMGFGQNANRITPIQSQSFNGSNQVPL

SEQ ID NO: 31366 - protein, 237 aa, Glycine max
  Clone ID: TF_GmC1795_3.pep
PVLKKFKRLKKGRRDIEEEPSGLSDEEELVGSGKAGRTAEEKLKRSLFGDDEGAPLEDIAEEEEQGEEEEDADIEEELENRGREQEKLQSELKKLQKLKEFKPTMNLPVLKDNEEKKDKKKKGCSEKKRPSPPYILWMKDQWNEIKSFGIIKFFLFSLFYLLKANSEAEFKEISTMLGSKWKTVTAEEKKPYEEIYHAEKEAYLQMIAKEKRETEAMRLLEDEQKQKTAMELLEQYM

SEQ ID NO: 31367 - protein, 101 aa, Glycine max
  unsure (1)..(101): unsure at all Xaa locations
  Clone ID: TF_22522754.pep
KPIRPPNAFFVFPEEVKKSFNAENTNAKAASNDAKPGXRNVNPXSSAEKAPYEIIAAKRKSDSEKLIQAYDNKYASSSNDEESYESKSEVNDDHDASGDDE

SEQ ID NO: 31368 - protein, 149 aa, Glycine max
  unsure (1)..(149): unsure at all Xaa locations
  Clone ID: TF_LIB3028-039-Q1-B1-C3.pep
GKSKTESKRADAKLAVNKNGAATKTRKPAGKGKAAKDPNKPKRPPSAFFVFMEEFRKVFNKERPDNKAVSAVGKGGWARWETMSXAGKAPYVGKSERREVECEKNMRAYNKKQAEGPTGGDEEKSEKSVSEVNGXDGYEEGHWEEEDDE

SEQ ID NO: 31369 - protein, 89 aa, Glycine max
  unsure (1)..(89): unsure at all Xaa locations
  Clone ID: TF_jC-gmXLIB3563P058bb03a1.pep
MKGGKNNTESKRAYAELAEDKKGAATNTTKSAGXANAAKDPNKPYRPPSAFFVFMEEFRKAFNXEHPGYKAKSAEGKSAGAKXKTMSDA

SEQ ID NO: 31370 - protein, 135 aa, Glycine max
  Clone ID: TF_GmC11_3.pep
MPSGISNFVSFRLKRKGAGAGRKQSKKAAKDPNKPKRPPSAFFVFMSEFREQFKKEHPNNKSVAVVGKAGGDKWKSLSDAEKAPFVATAEKKKQEYEKTILAYNKKLEGKNSEEDESDKSKSEVNDDEEDEVDGD

SEQ ID NO: 31371 - protein, 52 aa, Glycine max
  Clone ID: TF_GmC40409_2.pep
LRGLKIGNASGKKWISMTNEEKVKYYDIASEKRIEFDRAMAKFNNKMESGGV

SEQ ID NO: 31372 - protein, 63 aa, Glycine max
  Clone ID: TF_LIB3242-472-P1-J1-E9.pep
FGSRVGKAGGEKWKSLSDAEKAPFVATAEKKKQEYEKTISAYNKQLVNTFYPMYFFTSYSYCI

SEQ ID NO: 31373 - protein, 172 aa, Glycine max
  unsure (1)..(172): unsure at all Xaa locations
  Clone ID: TF_GmC11_4.pep
IPSQYNLTHFLSLSLFLSDSYIVCALAPNNHKICTVAEIGLNDACRRESATLWLKRKGTGAAGRKQSKKAAKVPNKRKRPPSAFFIFMSEFREQFKKEHPNLLMISTFXNLVCINLMFHEKXPFVAMAKKKKPEXXKTILAYXXKWXGKNPEEYESDKSKFEVHDDEAIEDC

SEQ ID NO: 31374 - protein, 93 aa, Glycine max
  Clone ID: TF_uC-gmroLIB3259P245c07b1.pep
VFCKKEHPNNKAGAGVGKAGGDKWQSLADAEKAPFAATAEKKKQEYEKTILAYNKKWEGTNPEEDESDKAKSEVNDDEEDEDEEDDDDDERRR

SEQ ID NO: 31375 - protein, 91 aa, Glycine max
  unsure (1)..(91): unsure at all Xaa locations
  Clone ID: TF_jC-gmXLIB3564P090af01b1.pep
QSMTESKRADPKLRXNKMGAGTMAKKPAGHAKAAKDPNKPXRPPSAFFVSMEDCRRVFTIEHPENIALPAESIAAGAKWKTMSDAERAPYV

SEQ ID NO: 31376 - protein, 159 aa, Glycine max
  unsure (1)..(159): unsure at all Xaa locations
  Clone ID: TF_GmC2181_16.pep
MKNAKGKGAARASKESLKPVDDRKVGKRKASGKPGRSSAPKKEKKAKKDPNKPKRPPSAFFVFLFVSSLLFPSYLSLRKMIXLIFLLCDSEEFRKTFKAENPNVKAVSVVGKAGGEKWKSLSSAVSFAIVINNGSFCYLLNYLTLHCFFSCFQYKFILK

SEQ ID NO: 31377 - protein, 88 aa, Glycine max
  Clone ID: TF_uC-gmropic112g01b1.pep
MKGGKSKTESKRADAKLAVNKKGAATKTRKPAGKGKAAKDPNKPKRPPSAFFVFMEEFRKVFNKEHPDNKAVSAVSVSVVKMSGDHII

SEQ ID NO: 31378 - protein, 117 aa, Glycine max
  unsure (1)..(117): unsure at all Xaa locations
  Clone ID: TF_LIB4281-020-R1-K1-D4.pep
HSLIRVLQDAFLVFMEEFKKAFNKEHPDNKALSAVFKSXMDQRWKTMSDAEKAPYVAKSEKRKVEYEKNMKAYNKKHAEGPTDGDETRXEKSVSEXNDEDDXEECIVEEEDDDYRMH

SEQ ID NO: 31379 - protein, 95 aa, Glycine max
  Clone ID: TF_GmC2181_49.pep
MGKGTGSFGKRRNKTHTLCVRCGRRSFHLQKSRCAACAFPAARTRKYNWSVKAIRRKTTGTGRMRYLRNVPRRFKSGFREGTEAAPRKKGAATTA

SEQ ID NO: 31380 - protein, 83 aa, Glycine max
  unsure (1)..(83): unsure at all Xaa locations
  Clone ID: TF_LIB3040-049-Q1-E1-C1.pep
MKRGKSKXESNRADAKPAVNKKGAAITTRKPAGKGNASKDSNKPKTPPSAFFVFMEEIMNVFNKEHPDSKTVSAVGKTAGAKW

SEQ ID NO: 31381 - protein, 123 aa, Glycine max
  unsure (1)..(123): unsure at all Xaa locations
  Clone ID: TF_LIB3242-438-P1-J1-G8.pep
MAKKVKGSHSASSASASSRKLVLRIKSNEGIKRSVRQTNSRKKPKAKQKKNKQMFDAMKPKKPPTAFFYFLXCHLKSRWDSFYLVHFYFSREDFRKEFQEQNPDVKSMRDIGKACGEKWKTVT

SEQ ID NO: 31382 - protein, 94 aa, Glycine max
  unsure (1)..(94): unsure at all Xaa locations
  Clone ID: TF_LIB3242-696-P1-K1-F7.pep
RPRVRRPPSAFFLFMGEFRGVFNKKHPENQTVSSLGKTSXTKWKTIFLFXKAPYVAKSEKRKVEYEKNXMRAYNKKQAEGPTCGDEKESEKSLS

SEQ ID NO: 31383 - protein, 73 aa, Glycine max
  Clone ID: TF_LIB3040-034-Q1-E1-A2.pep
MAKAISDAEGADRRLKRKGAGAGRKQSTKAAKDSNKPERPPSTFFGFMSEFIEQFKMEHPNNTAVAVVGKAGW

SEQ ID NO: 31384 - protein, 137 aa, Glycine max
  Clone ID: TF_LIB4164-047-Q1-K1-D2.pep
MPKAKSDAKAADSRLKRKGAGAGRKQSRKAAKDPNKPKRPPSAFFVFMSEFREQFKKEHPNNKSVAVVGKAGGEKWKSLSDAEKAPFVATAEKKKQEYEKTISAYNKQLEGKNSEEDESDKSKSEVNDDEEDEVELI

SEQ ID NO: 31385 - protein, 119 aa, Glycine max
  Clone ID: TF_LIB4203-002-R1-N1-C5.pep
REQLKRAKMAKDRKSRRKSSEAKKGKDPNAPKRPMSAYMLWLNASREKIKSDHPGISITDLSKKAGEIWKGMSKEKKEEWDRKAEDARREFPPRHSSSLSHSPWILCHLSNCSWWLPLP

SEQ ID NO: 31386 - protein, 313 aa, Glycine max
  unsure (1)..(313): unsure at all Xaa locations
  Clone ID: TF_GmC302_1.pep
MNVTNKPNPYGSTNGFQSLLQQNGWEQGSSRLRPTKLYPAPTARYQDIVRDANLFWGTLQAFHKTLGTKYKISTVGGTPLDLHRLLGDVTXREWEEVSLTFNVKDTIXSXSSMVRKSYLLMLLHYEQVYYFGIITLSNSTTIPEVAAVNDSPVQSSPVRAHDDMVSGTIDAKFDVGYVVTVTLGSEQLQGVLFHVPDNVSQSSHAEGTSSSQNLGDDTSNLQSRKRAKYAPRDPFRPKSNRSGYNFFFAENYARLKPSYHGQERAISKRIGFLWNNLSEAERQVYQEKGIRDKERYRTELMEYKSNNSTPNAQ

SEQ ID NO: 31387 - protein, 117 aa, Glycine max
  unsure (1)..(117): unsure at all Xaa locations
  Clone ID: TF_LIB3087-001-Q1-K1-E10.pep
MPKAKSDAKAADSRLKRKGAGAGRKQSKKAAKDPNKPKRPPSAFFVFMSEFREQFKKEHPNNKSVAVVGKAGGDKWKSLSDAFAFIXMFQEKAPFVATAEKKKQEYEKTILAYNKKL

SEQ ID NO: 31388 - protein, 165 aa, Glycine max
  Clone ID: TF_jC-gmst02400047f11a1.pep
MKGGKSKTESKRADAKLAVNKKGAVTKTRKPAGKGKAAKDPNKPKRPPSAFFVFMEEFRKVFNKEHPDNKAVSAVGKAAGAKWKTMSDAEKAPYVAKSENRKVEYEKNMRAYNKKQAESPTGGDEEESEKSVSDVNDEDDDDECSGQEEDTIEEWTVILHLVGLM

SEQ ID NO: 31389 - protein, 96 aa, Glycine max
  Clone ID: TF_LIB4128-120-Q1-K1-F9.pep
MKGGKSKTESKRADAKLAVNKKGAATKTRKPAGKGKAAKDPNKPKRPPSAFFVFMEEFRKVFNKEHPDNKAVSAVGKAAGAKWKTMSDAEKAPYVA

SEQ ID NO: 31390 - protein, 151 aa, Glycine max
  unsure (1)..(151): unsure at all Xaa locations
  Clone ID: TF_GmC43_4.pep
MKGGKSKTESKRADAKLAVNKKGAATKTRKPAGKGKAAKDPNKPKRPPSAFFVFXEFRKVFNKEHPDNKAVSAVGKAAGAKWKTMSDAEKAPYVAKSEKRKVEYEKNMRAYNKKQAEGPTGGDEEESEKSVSEVNDEDDDEEGSGEEEDDD

SEQ ID NO: 31391 - protein, 98 aa, Glycine max
  unsure (1)..(98): unsure at all Xaa locations
  Clone ID: TF_700559324H1.pep
FKDPNAPKRPPSAFFLFCSEYRPKIKGEHPGLSIGDVAKKLGEMWNNTAADDKQPYEKKAAKLKEKYEKDIAAYRAKGKXMQRKRGWSRLRRAKKKKR

SEQ ID NO: 31392 - protein, 152 aa, Glycine max
  Clone ID: TF_LIB5068-041-A1-XP1-A7.pep
MKGGKSKTESKRADPKLAVNKKGAATKARKPAGKGKAAKDPNKPKRPPSAFFVFMEEFRKVFNKEHPENKAVSAVGKAVVFKWNTMSDAEKAPYVAKSEKRKVEYEKNMRAYNKKQAEGPTAGDEEESEKPASDVHDEHDDEEGSGEETDDH

SEQ ID NO: 31393 - protein, 143 aa, Glycine max
  Clone ID: TF_uC-gmflLIB3275P091a02b1.pep
MKGGKSKTESKRADAKLAVNKKGAATKTRKPAGKGKAAKDPNKPKRPPSAIFVFMEEFRKVCNKEHPDNKAVSAVGKAAGAKWKTMSDAEKAPYVAKSEKRRVEYEKNMRAYNKKQAEGPTGGDERRSEKSVSEGNDEDDAEE

SEQ ID NO: 31394 - protein, 372 aa, Glycine max
  Clone ID: TF_GmC1739_1.pep
GPDSPSTQRPQILQKLKEWKPTMNLPVLKDNEEKKDKKKKGCSEKKRPSPPYILWMKDQWNEIKKANSEAEFKEISTMLGSKWKTVTAEEKKPYEEIYHAEKEAYLQMIAKEKRETEAMRLLEDEQKQKTAMELLEQYMQFKQEAEKDGKKNKKEKDPLKPKHPMSAYFLFTNDRRAALAAENKNFLEVPKITSEEWKNMTEEQKRPYEEMAKKNKEQYALEMEAYKQKKDEEAAHFMKEEEEQMKLQKQEALQLLKKKEKTENIIKKTKQNRQKKKQNKDDKNSDPNRPKKPASSFILFSKEARKTLQEERPGISTSTLNALVSLKWKELSEEDRQFWNGQASKAMDAYKKELEEYNKSLAATACQEQKTE

SEQ ID NO: 31395 - protein, 117 aa, Glycine max
  Clone ID: TF_uC-gmflminsoy075f12b1.pep
MKGGKSKTESKRADAKLAVNKKGAATKTRKPAGKGKAAKDPNKPKRPPSAFFVFMEEFRKVVNKEHPDNKAVCAVGKAAGAKWKTMSDAEKAAYVAKTEKRKVESEKNMRAYNKKQA

SEQ ID NO: 31396 - protein, 152 aa, Glycine max
  Clone ID: TF_GmC43_1.pep
MKGGKSKTESKRADPKLAVNKKGAATKARKPAGKGKAAKDPNKPKRPPSAFFVFMEEFRKVFNKEHPENKAVSAVGKAAGAKWKTMSDAEKAPYVAKSEKRKVEYEKNMRAYNKKQAEGPTGGDEEESEKSVSEVNDEDDDEEGSGEEEDDD

SEQ ID NO: 31397 - protein, 156 aa, Glycine max
  Clone ID: TF_GmC43_10.pep
MKGGKSKTESKRADPKLAVNKKGAATKARKPAGKGKAAKDPNKPKRPPSAFFVFMEEFRKVFNKEHPENKAVSAVGKAAGAKWKTMSDAEKAPYVAKSEKRKVEYEKNMRAYNKKQAEGPTGGDEEESEKSVSEVNDEDDDEEGSGEEEDDDYRMD

SEQ ID NO: 31398 - protein, 152 aa, Glycine max; identical to SEQ ID NO: 31396
  Clone ID: TF_GmC43_8.pep

SEQ ID NO: 31399 - protein, 147 aa, Glycine max
  unsure (1)..(147): unsure at all Xaa locations
  Clone ID: TF_LIB3242-426-P1-J1-E4.pep
MKGGKSXKTESKRADPKLAVNKKGAATKARKPAGKGKAAKDPNKPKRPPSAFFVFMEEFRKVFNKEHPENKAVSAVGKAAGAKWKTMSDAEKAPYVAKSEKRKVEYEKNMRAYNRKQAEGPTGGDEEESEKSVSEVNDEDDDEEGSG

SEQ ID NO: 31400 - protein, 141 aa, Glycine max
  Clone ID: TF_GmC2181_11.pep
KTTECFLRVPVCIFFALSFISLPWKNGMTYFVLCDSEEFRKTFKAENPLVKAVSVVGKAGGEKWKSLSSAEKAPYEAKAAKRKAEYEKLIKAYEKKQASSADDDESDKSKSEVNDEDDASGEEDHQEDEDDEEEEDDEDDD

SEQ ID NO: 31401 - protein, 152 aa, Glycine max
  Clone ID: TF_GmC43_6.pep
MKGGKSKTESKRADAKLAVNKKGAATKTRKPAGKGKAAKDPNKPKRPPSAFFVFMEEFRKVFNKEHPDNKAVSAVGKAAGAKWKTMSDAEKAPYVAKSEKRKVEYEKNMRAYNKKQAEGPTGGDEEESEKSVSEVNDEDDDEEGSGEEEDDD

SEQ ID NO: 31402 - protein, 152 aa, Glycine max
  unsure (1)..(152): unsure at all Xaa locations
  Clone ID: TF_10843327.pep
MKGGKSKTESKRADPKLAVNKKGAATKARKPAGKGKAAKDPNKPKRPPSAFFVFMEEFRKVFNKEHPENKAVSAVGTAAGAQWKTMSDAEKAPYVAESXERRVEYDENMRAYDKKQAECATWWDDEESENSVSDVNDKHDDKACTCYVEDDE

SEQ ID NO: 31403 - protein, 286 aa, Glycine max
  Clone ID: TF_GmC1795_1.pep
MGGTVVAEVPTKRGRGRRALKEKTPSTNDANIIIATPISPSSEKAAQVVPSKKKQDSKKQQSFEKELLEMQEMLQQMRLEKEKTEELLKVKDEALKLKEEELENRGREQEKLQTELKKLQKLKEFKPTMNLPVLKDNEEKKDKKKKGCSEKKRPSPPYILWMKDQWNEIKKANPEAEFKEISTMLGAKWKTVSAEEKKPYEGIYHAEKEAYLQVIAKEKRETEAMRLLEDEQKQRTAMELLEQYMQFKQEAGKDGQKNQKEKKQQAANDPLSPLFAFEKRETEAMR

SEQ ID NO: 31404 - protein, 640 aa, Glycine max
  Clone ID: TF_GmC2151_1.pep
MTDGHLFNNITLGGRGGTNPGQIKIYPGGIIWKRQGGGKLIEVDKSDIMGVTWMKVPRSNQLGVQIKDGLYYKFTGFRDQDVVSLTNFFQNTCGISVEEKQLSVSGRNWGEVDLNGNMLAFTVGSKQAFEVSLADVSQTQLQGKNDVILEFHVDDTTGANEKDSLMEISFHIPNSNTQFVGDENRPPAQVFRDKIMSMADVGAGGEDAIVTFEGIAILTPRGRYSVELHMSFLRLQGQANDFKIQYSSVVRLFLLPKSNQPHTFVIISLDPPIRKGQTLYPHIVMQFETDYVVESELAINEDLYNTKYKDKLDLSYKGLIHEVFTTILRGLSGAKVTKPGKFRSCQDGYAVKSSLKAEDGILYPLEKSFFFLPKPPTLILHEEIDYVEFERHAAGGSNMHYFDLLIRLKSEQEHLFRNIQRNEYHNLYEFISSKGLKILNLGDAQPTVGIKKVLENDDDDAVDPHLERIKNEAGGDESDEEDSDFVADKDDEGSPTDDSGADDSDATDSGDEKEKPAKKESKKDLPSKASTSKKKSKDDEDGKKRKQKKRKDPNAPKRAMSGFMFFSKLERENLKKTNPGISFTDVSRVLGEKWKKLSVEEKEPYEAKAREDKKRYKDEISGYKNPQPMNIDSGNESDSA

SEQ ID NO: 31405 - protein, 93 aa, Glycine max
  Clone ID: TF_LIB3108-006-Q1-K1-F10.pep
MKGVKPRNRTVKPDDKLGAKRKGADKVSRQVKRAKAGKDPNAPKRPPTAFFIFMDDFRKEFKEKNPNNKSVDTVSKAGRDKWKSMSDAEKAPY

SEQ ID NO: 31406 - protein, 80 aa, Glycine max
  Clone ID: TF_LIB3242-726-P1-J1-G4.pep
SGFMFFSKLERENLKKTNPGISFTDVGRVLGEKWKKLSAEEKDPYEAKAREDKKRYMDEISGYKNPQPMNIDSGNESDSA

SEQ ID NO: 31407 - protein, 120 aa, Glycine max
  unsure (1)..(120): unsure at all Xaa locations
  Clone ID: TF_LIB3065-016-Q1-N1-B7.pep
MKGGKFKTESKRAHAKLAVNKKGAVTKTRKPPGKGKASKDPNKPKRPPSAFFVFMEEFRKVFNTEHSYNKAASAVGKAAGAXWKTMSDAEKAPYVAKSEKRKVEYEKNMIAYNTKHAEGP

SEQ ID NO: 31408 - protein, 209 aa, Glycine max
  unsure (1)..(209): unsure at all Xaa locations
  Clone ID: TF_GmC1637_1.pep
MASSQSRKRVDAVDSRAASVLVRAKDGSAFARCDDCKKNVPVALIDMHSCSLEAKIKMNLDAQVVEQAAEAKKPERKKPKSKEPXQKKAKVGKGKKVKDPNMPKRPPTAFFVFLDDFRKSFKEANPDSKDVKRVGKEAGEKWRSMTDEEKKPYLDKVAELKEEYEKAMESYEAGQDEEDQTVSDKETSDKEAAAKEVAIEVEEELTDED

SEQ ID NO: 31409 - protein, 149 aa, Glycine max
  unsure (1)..(149): unsure at all Xaa locations
  Clone ID: TF_uC-gmroLIB3258016f05a1.pep
KVLPPNDFGANVSDGSDSGDEKKKPAKKESKKVLPFKASTSKKKSKDDEDGKKKKQKKKKDPNAPKRAMSGFMFFSKLERENLKKTNPGISFTDAGRVLGEKWKKLSAEEKEPYEAKAREDKKRYKDEISGXKNPQHMNIDSGNESDSS

SEQ ID NO: 31410 - protein, 102 aa, Glycine max
  Clone ID: TF_GmC9778_5.pep
KRRKHLEASLALRFDVSRGIQPQYFKSAFVGYTVGLVLTIVVMNWFQAAQPALLYIVPSVIGFLAAHCLWNGDVKQLLEFDESKTANSPQESDDDKSSKKVE

SEQ ID NO: 31411 - protein, 121 aa, Glycine max
  unsure (1)..(121): unsure at all Xaa locations
  Clone ID: TF_LIB3108-030-Q1-K1-H7.pep
TADAKLAVNKKGAVTKTRKPAGKGKAAKDPNTPKRPPSAIFDLMEEFRKVFNIEHPDNKAVSAVGKAAGAKWXTMFDAETAPYVAKSEKRKVEYEKNMRAYNRNHAXGTTGEDEEESDTFA

SEQ ID NO: 31412 - protein, 129 aa, Glycine max
  Clone ID: TF_8285483.pep
KGGKTKTESNRANPKLAVNKRGTATKARKPAGKGKAAKDPSKPKRPASAVFDFIEEFRKVFSKEHPENKAVCAVGKSARTKWKTMSDAEKAPYVAESEKRKVEFEKSIRAYIKKQAEGPTGGDEEDSEK

SEQ ID NO: 31413 - protein, 445 aa, Glycine max
  unsure (1)..(445): unsure at all Xaa locations
  Clone ID: TF_GmC2151_2.pep
MSMADVGAGGEDAIVTFEGIAILTPRGRYSVELHMSFLRLQGQANDFKIQYSSVVRLFLLPKSNQPHTFVIISLDPPIRKGQTLYPHIVMQFETDYVVESELAINEDLYNTKFKDKLELSYKGLIHEVFTTILRGLSGAKVTKPGKFRSCQDGYAVKSSLKAEDGILYPLEKSFFFLPKPPTLILHEEIDYVEFERHAAGGSNMHYFDLLIRLKSEQEHLFXNIQRNEYHNLYEFISSKGLKIMNLGDAQPTVGIKKVLENDDDDAVDPHLERIXNEAGEDESDEEDSDFVADKDDEGSPTDDSGADDSDATDSGDEKEKPAKKESKKDLPSKASTSKKKSKDDEDGKKKKQKKKKDPNAPKRAMSGFMFFSKLERENLKKTNPGISFTDVGRVLGEKWKKLSAEEKEPYEAKAREDKKRYMDEISGYKNPQPMNIDSGNESDSA

SEQ ID NO: 31414 - protein, 73 aa, Glycine max
  Clone ID: TF_13477705.pep
MCAFYYIVVFYSIYFAMNFRLAVNKKGAATKARKPAGKGKAAKDPNKPKRPPSAFFVFMEEFRKVFNKEHPEN

SEQ ID NO: 31415 - protein, 121 aa, Glycine max
  Clone ID: TF_LIB3039-016-Q1-E1-A3.pep
VFISILNLSLFSLNQYPTSRPCSPLVSVIERGKSKTESKRADPKLAVNKKGAAIKARIPAGKGKAAKDPNKPKRPPSAFFVFMEEFRKVFIKEHPENNAVSAVGKAAGAKWKTMSDAEKAP

SEQ ID NO: 31416 - protein, 133 aa, Glycine max
  unsure (1)..(133): unsure at all Xaa locations
  Clone ID: TF_LIB3242-344-Q1-J1-E3.pep
MKGGKSKTESKRVDAKFVVNKKGAVTKTRKFAGKGKAAKDPNKPKRPPSVFFVFMEEFRKVFNKEHPDNKAVFVVGKAAGAKWKTMSDAEKAPYVAKSEKRKVEYEKNMRVYNKKQAEGLTGXDEEEFEKSVS

SEQ ID NO: 31417 - protein, 101 aa, Glycine max
  unsure (1)..(101): unsure at all Xaa locations
  Clone ID: TF_LIB3106-038-Q1-K1-C6.pep
MKGGTSKTESKRADPKLAVNKKGAATKARKPAGKGKAAKDPNKPKRPPSAFFVFMEEFXNVFNKEHPENXAVSAVGKAAGAQWKTMSDAEKTPYVAQSEKR

SEQ ID NO: 31418 - protein, 103 aa, Glycine max
  unsure (1)..(103): unsure at all Xaa locations
  Clone ID: TF_LIB3242-707-P1-K1-B4.pep
SKTAEPELAVNNKGAYTYAKQLDEKGKAPXDANKPNRPSSAFYGFMDEFRKVFNKQHPEHKSLSAWSKLLRAKLDTMSDAEKAPYVAKCVNRKVVYQMNMTAY

SEQ ID NO: 31419 - protein, 115 aa, Glycine max
  Clone ID: TF_LIB3242-762-P1-J1-A1.pep
MKGGKSKTESKRADPKLAVNNKGAATKARKPAGKGKAVKDPNKPKRPPSAFFVFMEEFRKVFNKEHSANKAVSVVGKAAGAKWKTMSDAEKAPYVANSEKRKVVYQKNMRAYNKK

SEQ ID NO: 31420 - protein, 163 aa, Glycine max
  Clone ID: TF_GmC2181_34.pep
MKTAKGKGAARPSKESLKPVDDRKVGKRKASGKPEKSRAPKKEKKAKKDPNKPKRPPSAFFVFLEEFRKTFKAENPLVKAVSVVGKAGGEKWKSLSSAEKAPYEAKAAKRKAEYEKLIKAYEKKQASSADDDESDKSKSEVNDEDDASGEEDHQEDEDDEEGE

SEQ ID NO: 31421 - protein, 169 aa, Glycine max
  Clone ID: TF_GmC2181_40.pep
MKTAKGKGAARPSKESLKPVDDRKVGKRKASGKPEKSRAPKKEKKAKKDPNKPKRPPSAFFVFLEEFRKTFKAENPLVKAVSVVGKAGGEKWKSLSSAEKAPYEAKAAKRKAEYEKLIKAYEKKQASSADDDESDKSKSEVNDEDDASGEEDHQEDEDDEEEEDDEDDD

SEQ ID NO: 31422 - protein, 119 aa, Glycine max
  Clone ID: TF_16347117.pep
KGGKSKTESKRADAKLAVNKKGAATKTRKPAGKGKAVKDPNKPKRPPRAFFVFMEEFRKVFNKEHPDNKAVSAVAKAAGAKWKTMSDAEKAPYVGHSRKRKVEHQKNLRAYYMKQAGRP

SEQ ID NO: 31423 - protein, 151 aa, Glycine max
  unsure (1)..(151): unsure at all Xaa locations
  Clone ID: TF_10232396.pep
KGGKSKTXSKRADAPLAVNXMGSDTKTRKPARKGKAAKDPNKPKMPPSAFFVFMEEFKKVSNKEHPDNKPVSAVGKSAGAKWKTMSDAEKAPYVAESEKRKVDYEKNMRAYNKKQAEGPTGGDEEESEKSVSEVNDDDDDDECIGEDDDDD

SEQ ID NO: 31424 - protein, 96 aa, Glycine max
  unsure (1)..(96): unsure at all Xaa locations
  Clone ID: TF_LIB3242-711-P1-K1-H1.pep
MPKAKYDAKAVDXRMKRKGAGAGRKQSKKAAKDPNKPKRPPSAFFDFMSEFREQYKKEHTNNKFSGVVSKAGGDKWKWLSEAEKALFVATVERRNK

SEQ ID NO: 31425 - protein, 142 aa, Glycine max
  Clone ID: TF_GmC11_1.pep
MPKAKSDAKAADSRLKRKGAGAGRKQSKKAAKDPNKPKRPPSAFFVFMSEFREQFKKEHPNNKSVAVVGKAGGDKWKSLSDAEKAPFVATAEKKKQEYEKTILAYNKKLEGKNSEEDESDKSKSEVNDDEEDEEEEDDDDDE

SEQ ID NO: 31426 - protein, 141 aa, Glycine max
  Clone ID: TF_GmC11_2.pep
MPKAKSDAKAADSRLKRKGAGAGRKQSRKAAKDPNKPKRPPSAFFVFMSEFREQFKKEHPNNKSVAVVGKAGGEKWKSLSDAEKAPFVATAEKKKQEYEKTISAYNKQLEGKNSEEDESDKSKSEVNDDEEDEEEDDDDDE

SEQ ID NO: 31427 - protein, 149 aa, Glycine max
  unsure (1)..(149): unsure at all Xaa locations
  Clone ID: TF_10844802.pep
KRGKFNTDSNRAYPKLAVNNKGAGTKARIPAGNGKAVKDPNKPNRPASAIFVLMEEFRNVFNKXHPENKALSAVGKAAGAKWKTMSDAEKAPYVAXSEKRKVEYEKNMRAYNKKQAECPTGGDEEXSEKSVSDVNDEHDDEQSDGEEED

SEQ ID NO: 31428 - protein, 150 aa, Glycine max
  Clone ID: TF_GmC34041_1.pep
MAKKAKGSHSASSASASSSSDKLVLRIKSNEGTKRSVRQTNSRKKLKAKQKKNKQKFDAMKPRKPPTAFFYFLEDFRKEFQEQNPDVKSMRDIGKACGEKWKTMTYEEKVQYYDIATKKREEFDSAMAEFNKKMENGEFDETDDESEFDE

SEQ ID NO: 31429 - protein, 200 aa, Glycine max
  Clone ID: TF_GmC1637_2.pep
MASSQSKKRVDAVDSRAASVLLRAKDGSAFARCDDCKKNVPVALIDMHSCSLEAKIKMNLDAQVVEQAAEAKKPERKKPKSKEPMAKKAKVEKVKKVKDPNMPKRPPTAFFAFLDDFRKSFKEANPDSKDVKRVGKEAGEKWRSMTDEKKKPYLDKVAELKAEYEKAMESYEAGQDEEDQAGSDKEAAAKEVEEELTDEE

SEQ ID NO: 31430 - protein, 166 aa, Glycine max
  Clone ID: TF_GmC2181_47.pep
MKNAKGKGAARASKESLKPVDDRKVGKRKASGKPGRSSAPKKEKKAKKDPNKPKRPPSAFFVFLEEFRKTFKAENPNVKAVSVVGKAGGEKWKSLSSAEKAPYEAKAAKRKAEYEKLIKAYDKKQASSADDEESDKSKSEVNDEDDASGEEEEEDDEEEEDDEDDD

SEQ ID NO: 31431 - protein, 80 aa, Glycine max
  Clone ID: TF_LIB3040-017-Q1-E1-G12.pep
MTRGKSKTESKTADCKLAVNNKGAANNAKKLAGNGNAAKDANKRKRPPSAFFVFMEEFTNVFNKEHPENKSVSAVGKTAG

SEQ ID NO: 31432 - protein, 106 aa, Glycine max
  unsure (1)..(106): unsure at all Xaa locations
  Clone ID: TF_11689089.pep
TDFKRTDPKLAANMSGASTNARKPAGKGKAAKDPNKPKKPSNAFFVFMEEFRKVFNKEHPENKAVSAVGKAAGAKWKTMSDAEKAPYVAKSEXRKVEYEKNMTAYN

SEQ ID NO: 31433 - protein, 128 aa, Glycine max
  Clone ID: TF_uC-gmflLIB3275P072h03b1.pep
ALRFWKPAGKGKAAKDPNKPKRPPSAFYDFMEEFRKVFNKEHSENKAGSAGGKAAGAKWKTMSDAEKAPYVAKSEKRKVEYEKNMRAYNKKQAEGPTGGDEEKPEKPVSEVNDEDDDEEGSGEEEDDQ

SEQ ID NO: 31434 - protein, 156 aa, Glycine max
  unsure (1)..(156): unsure at all Xaa locations
  Clone ID: TF_LIB4391-014-R1-K1-E6.pep
MKGGKSKTESKRADPKLAVNKKGAATKARKPAGKGKAAKDPNKPKRPPSAFFVFMEEFRKVFNKEHPENKAVSAVGKAAGAKWKTMSDAEKAPYVAKXSEKREVEYEKNMRAYNKKQAXEGPTGGDEXEESEKSVSEVNDEDDDEXEASGEEKDDD

SEQ ID NO: 31435 - protein, 124 aa, Glycine max
  Clone ID: TF_4260356.pep
KGGKFKTESKRADAKLAVNKKGAATKTRKPAGKGKAAKDPNKPKRPSSAFFVFMEEFRKVFNKEHPDNKAVSAVGKAAGAKWKTMSDAEKAPYVAKSEKRKVEYEKNIRAYNKKQAEGPTGGDE

SEQ ID NO: 31436 - protein, 129 aa, Glycine max
  Clone ID: TF_7146626.pep
KGGKSKTESKRADAKLAVNKKGAATKTRKPAGKGKAAKDPIEPKRPPRAFFVIMEEFRKVCNKEHPDNKAESAVGKAAGAKWKTMSDAEKAPYVAKSETTRVEYEKIMIAHNKKQAERPTSGDEEESEK

SEQ ID NO: 31437 - protein, 141 aa, Glycine max
  Clone ID: TF_20075468.pep
HKKKYPTENVQVTEITKKCSEKWKTMSDDEKRRFYELAQKDAERYQAEVAAYGGDDVTKKRKITKKDPNAPKRALSAFFFFSNEERPEVQRQHPEWKVGQVAQELGKFWKNLPDEEKAIYENKATEDQERYAQEMKTYRGE

SEQ ID NO: 31438 - protein, 140 aa, Glycine max
  Clone ID: TF_7147175.pep
HQAKLAVNKKGAATKTRKPAGKGKAAKDPNKPKRPPSAFFVFMEEFRKVFNKEHPDNKAVSAVGKAAGAKWKTMSDAEKAPYVAKSEKRKVEYEKNMRAYNKKQAEGPTGGDEEESEKSVSEVNDEDDDEEGSGEEEDDD

SEQ ID NO: 31439 - protein, 152 aa, Glycine max; identical to SEQ ID NO: 31401
  Clone ID: TF_GmC43_2.pep

SEQ ID NO: 31440 - protein, 152 aa, Glycine max; identical to SEQ ID NO: 31401
  Clone ID: TF_GmC43_7.pep

SEQ ID NO: 31441 - protein, 388 aa, Glycine max
  unsure (1)..(388): unsure at all Xaa locations
  Clone ID: TF_GmC1089_1.pep
MEEYTNNNHLSENTGPSPSTPRPNFLYSSASGGNHNHQHQHHSHHHHHHHQFPINTFHLQSGGSDHCFQSDQVSPHPSVKSEASTSQLHAPIFHYPLMRGNLHNTMHHHHPQQQQGGSPTSSTGEVEAIKAKIIAHPQYSNLLEAYMFNLXIGAPPEVVARMAAAKQEFEARQRSSVGSRETSKDPELDQFMEAYYDMLVKYREELTRPIQEAMDFMRRIETQLNMLCNGPVRIFSDDKCEGAGSSEEDQDNSGGETELPEIDPRAEDRELKNHLLKKYSGYLSSLKQELSKKKKKGKLPKDARQKLLNWWELHYKWPYPSESEKVALAESTGLDQKQINNWFINQRKRHWKPSEDMQFMVMDGLHPQSATLYMDGHYMADGHYRLGP

SEQ ID NO: 31442 - protein, 58 aa, Glycine max
  Clone ID: TF_LIB3242-137-Q1-J1-H8.pep
PRQVAIWFQNRRARWKSKRIEQEYRKLKDEYDNLASRFESLKKEKDSLQLEVISFWFF

SEQ ID NO: 31443 - protein, 379 aa, Glycine max
  Clone ID: TF_GmC1144_1.pep
MEGGSSSSNGTSYLLAFGENNSGGLCPMTMMPLVTSHHAGHHPINPSNNNNVNTNCLFIPNCSNSTGTPSIMLHINHNNNKTEDDDNNNNSGVGYYFLELVHHQHHEGNNTNRGRSSSASSSAAKAKIMSQPHYHRLLAAYVNCQKVGAPPEVVARLEEACASAATMAGGDAAAGSSCIGEDPALDQFMEAYCEMLTKYEQELSKPLKEAMLFLQRIECQFKNLTISSSDFASNEGGDRNGSSEEDVDLHNMIDPQAEDRDLKGQLLRKYSGYLGSLKQEFMKKRKKGKLPKEARQQLLEWWNRHYKWPYPSESQKLALAESTGLDQKQINNWFINQRKRHWKPSEDMQFVVMDPSHPHYYMDNVLGNPFPMDLSHPML

SEQ ID NO: 31444 - protein, 149 aa, Glycine max
  Clone ID: TF_LIB4390-053-R1-K1-H4.pep
SASNEGGDRNGSSEEDVDLHNMIDPQAEDRDLKGQLLRKYSGYLGSLKQEFIKKRKKGKLPKEARQQLLEWWNRHYKWPYPSESQKLALAESTGLDQKQINNWFINQRKRHWKPSEDMQFVVMDPSHPHYYMDNVLGNPFPMDLSHPML

SEQ ID NO: 31445 - protein, 365 aa, Glycine max
  Clone ID: TF_GmC1144_2.pep
SSRIGSSGENSGGLCPMTMMPLVTSHHATNPSNPSNNTNNNENTNCLFIPNCSNSSGTPSIMLHNNNTDDDNNKTSTNTGLGYYFMESDHHHRNNNNNGSSSSSSSSAVKAKIMAHPHYHRLLAAYVNCQKVGAPPEVVARLEEACASAVTMAGDAAAAAGSSCIGEDPALDQFMEAYCEMLTKYEQELSKPLKEAMLFLQRIECQFKNLTISSTDFACNEGAERNGSSEEDVDLHNMIDPQAEDRELKGQLLRKYSGYLGSLKQEFMKKRKKGKLPKEARQQLLEWWSRHYKWPYPSESQKLALAESTGLDQKQINNWFINQRKRHWKPSEDMQFVVMDPSHPHYYMDNVLGNPFPMDLSHPML

SEQ ID NO: 31446 - protein, 245 aa, Glycine max
  Clone ID: TF_GmC1144_3.pep
IRLELLAAYVNCQKVGAPPEVVGRLEEACASAAVIMAGGTASIGEDPALDQFMEAYCEMLIKYEQELSKPFKEAMLFLQRIECQFKSLTISSSLDTTACNEAIDRNGPSEDVDVQTNIIDPQAEDQELKGQLLRKYRGYLGSLKQEFTKKRKKGKLPKEARQQLLEWWSRHYKWPYPSESQKLALAESTGLDQKQINNWFINQRKRHWKPSEDMQFVVVDPSHPHYYMENVLGNPFPMDLSHPML

SEQ ID NO: 31447 - protein, 195 aa, Glycine max
  Clone ID: TF_GmC1293_2.pep
VDKHILARQTGLSRSQVSNWFINARVRLWKPMVEEMYLEEEKEHQNDVASSEGGGINILGDQKPTQARLVRIDSECMSSIVNNPDDKNDTKSGKTIQNDNQMDAFGSVELDFWSYTHQYSSGHSGGVSLTLGLQQHGESGVSLAFPPAATQSSMFYPRDQIEDCQTVQYSLVDGKGQNMPYRNLMGTHLLHDHLV

SEQ ID NO: 31448 - protein, 187 aa, Glycine max
  Clone ID: TF_GmC262110_1.pep
DELMLAKQTGLSRNQVSNWFINARVRLWKPMVEEIHMLESQQGQKRSHWEERSKKNLSDHLPSDHNSVVFENPSTSMEKFHDAPYKHPRNELANKQVRSQEQLNQTNTGNQQVMGVGVSNNGVSLTLGLHQNHHGIGLFEPFGMSAAQRFGVALQPEGYVLSSFESQNRHFGKDVIGGGQLLHDFAC

SEQ ID NO: 31449 - protein, 223 aa, Glycine max
  unsure (1)..(223): unsure at all Xaa locations
  Clone ID: TF_GmC1478_1.pep
MAFPPPHGFTFNTTHEEDHHHLPPTSLNPFPSLPPQHFQGGASFMLKRSMSFSGIENKCDEVLHGDDELSDDGIFPCGGFTFNTTHEEEHGHYPPTDLGALLALPPQLLQGGALGLQPRQVAIWFQNRRXARWKTKHLEKEYEVLKKQFEAVKADNDVLKVENQKLQAELQAVKSRDWCEAGMMSHKKETEGSWSNGSDNSLEINLDHSRTLGLNSPISSQKG

SEQ ID NO: 31450 - protein, 447 aa, Glycine max
  Clone ID: TF_GmC309_2.pep
GSSNNVLNSQYLKAAQELLDEIVNVRKALKQTGLEKQQSFRDIGLDGSKDSDGKSTSQSVQISSGPNGSAANSSCELSPAERQNLLDKKTKLLSMLDEVDKRYRQYCHQMQIVVSSFDMVAGCGAAEPYTALALRTISRHFRCLRDAISGQIQVTQRNLGEQEGIPRLRYVDQQLRQQKALQQLGVMRQAWRPQRGLPETSVSVLRAWLFEHFLHPYPKDSEKIMLARQTGLTRNQVANWFINARVRLWKPMVEEMYKEEFGDSEMSSNLLSSEKTLKAPRDDVQASDNKREESQDNLINVDDSVQHHGLKLDHASELDRGIQSSDHGENAMDPRIGKLQGDQRFNMNNSNNNSPYYGDGCIMASTPATYDLPELGNIAVDGHVSLALELRNCESQGFGVSNDDMHKRHKKTLASSPETDLLDYHFTDPGKQQNKFGNPHLLHEFVV

SEQ ID NO: 31451 - protein, 150 aa, Glycine max
  unsure (1)..(150): unsure at all Xaa locations
  Clone ID: TF_GmC320602_1.pep
EESFKEHTTLNXXQKLAXAKQLNLXXRQVEVWFQNRRARTKLKQTEVDCEYLKRCCETLTEENRRLQKELQELRALKSSQPFYMQLPATTLTMCPSCERVATNSTTTNQTSIVNNNASSQIPVELSLSKPRILPFPNGQVQAQAHQIASS

SEQ ID NO: 31452 - protein, 141 aa, Glycine max
  Clone ID: TF_LIB3094-027-Q1-K1-C10-F3A.pep
LMRSFFLYFLCIGVFIFFLGQFCYVLMFFLVFRIFFFVLYLKFCFCFFFFFICFCVYFLCVFVFFSCIFFCSFFFRFFTFVFFFWLFCMCLFFLFVFFLAGFFFFGFFFLSCVFFLFFFYILFFLLFCVFVFFSLFSFFFF

SEQ ID NO: 31453 - protein, 311 aa, Glycine max
  Clone ID: TF_GmC1350_1.pep
MDMMNMETNNRKFLSLPLSNNNNNSGNAQMRSSSDNRRVPVTSNSNIAQEHHYSHHNPTDTCSVRDKIMAHPFFPRLLSSYLNCLKVGAPPEVVASLEESCAKCESFNASSGRTGGSIGEDPALDQFMEAYCEMLIKYEQELTKPFKEAMLFFSRIECQLKALAVSSDFGQSETSSQNEVDVHENNLDSQAEDRELKVQLLRKYSGYLGSLKKEFLKKKKNGKLPKEARQQLLDWWNRHYKWPYPSESQKQALAESTGLDLKQINNWFINQRKRHWKPSEDMQFAVMDATNYYMENVMCKPFPMDGMPMLL

SEQ ID NO: 31454 - protein, 204 aa, Glycine max
  Clone ID: TF_GmC419_152.pep
MAFESHYVLLLCSFKEQLQQHVRVHAMEAVMACWDIEQSLQSLTGVSPGEGTGATMSDDEDDQVDSDANLFDSSFDGADGMGFGPLVPTESERSLMERVRQELKHELKQGYKEKIVDIREEILRKRRAGKLPGDTTSVLKAWWQSHSKSPYPTEEDKARLVQETGLQLKQINNWFINQRKRNWHSNPSTSTVLKSKRKRYSHQN

SEQ ID NO: 31455 - protein, 327 aa, Glycine max
  Clone ID: TF_GmC1549_1.pep
FLFLLLLTMLDEVYRRYRQYYQQMQAVVTSFEYVSGLSNAAPYASLAIKAMSKHFRCLKNAITDQIQFANKAHFHISNRKDESPRFGNSDRGPYGQRPGFLEHQPVWRPQRGLPERAVTVLRAWLFEHFLHPYPTDTDKLMLAKQTGLSRSQVSNWFINARVRLWKPMVEEIHMLETRQAPKNLQKEEHCTNKPSDHLPSDNSIVSENPSTSTDKFQEAPYKRAINELPNIPVRTQEQLNLPCTSNQPGGVGVSMGGSASNSVSLTLGLYQNHGIGLAEPFPLNAAQRFGVALETNNEGYVMSDYESQNRHFGRDVIGGQLLHDFVG

SEQ ID NO: 31456 - protein, 140 aa, Glycine max
  Clone ID: TF_GmC1814_1.pep
RKLFQDLPKISSGLSQLSLFDRDSRQSRMSLQQLGVIRSQRQVWRPIRGLPETSVAILRSWLFEHFLHPYPNDSEKLMLASQTGLTKNQVSNWFINARVRLWKPMIEEMYKEEFGEFSEDSNPAGNNYLTREDTTDCVED

SEQ ID NO: 31457 - protein, 187 aa, Glycine max
  Clone ID: TF_GmC444_1.pep
MYFFHLQMKMQLARALGLQPRQIAIWFQNRRARWKTKQLEKDYDVLKRQYEAIKADNDALQFQNQKLQTEILALKSREPTESINLNKETEGSSSNRSENSSEIKLDISRTPAIDSPLSTQQNNNNRTLFPSSARPTGVAQLFQTTPRPEIQCQKIDHMVKEESLSNMFCGIDDQSGLWPWLEQQHFN

SEQ ID NO: 31458 - protein, 272 aa, Glycine max
  Clone ID: TF_GmC969_1.pep
FGTRQRWLPESSVVILRAWLFEHFLHPYPKDSDKIMLAKQTGLTRSQVSNWFINARVRLWKPMIEEMYKQDNCIAGMDSNSSSENVSKVTKSYVKTSNDVGDDSQHCQSPIVADTNHSGGQAKDLRHDQALDTEMMASIGLASPITSIYGAETEHRRNLDDCGLFSNDTVVQSDGATNKRFVSVGPTCQMPESERFKSGSGVSLTLGLQHCEGGNFLPGKTHLSLVSMREDDISKATAASTVGVETTELECIGAGNQQQRLNSPHMLHDFEV

SEQ ID NO: 31459 - protein, 461 aa, Glycine max
  Clone ID: TF_GmC2043_2.pep
RAGSSCGGGENNNNNDGGKQGVELSTAQRQELQMKKSKLVTMLDEVEQRDRQYHHQMQVVITSFEQAAGVGAAKSYTALALKTISKQFRCLKDAISSQIKTTSKTLGEDNCLGVKVEGSRLRYVDHQQRQQRALQLGMIQHNAWRPQRGLPERAVSVLRAWLFEHFLHPYPKDSDKVMLAKQTGLTRSQVSNWFINARVRLWKPMVEEMYLEEVKQEPNNSSQDNNNTKGSNESSKELWSEANAAAQESGAMRFDQINILQSKAESFKNNQTTSPTEISNSNSLQSGFHLADMQSPNKPKSTSEMHQNSPGSILSVDMEMKPHHHGETNNITREGQNNNTTTKFGIESHGGGFGAFPNMEDIGRFHHHVTEQLAPRFHGNGVSLTLGLPHSTENNLSLSGTTQHGFLSQNMHLGMRNSENDEFCGAINTTPPSSHSGISYESIDIQNRKRFAAQLLRDFVA

SEQ ID NO: 31460 - protein, 459 aa, Glycine max
  unsure (1)..(459): unsure at all Xaa locations
  Clone ID: TF_GmC309_1.pep
MCLKEDPSDLPRYSYSILNSLYLNTAQKMLDEICTVRKALKXRLKEKQENTGLDGSKDSDGKSTSQSMQMSSGPNGSTANASSELSSAERQNLLDKKTKLLSMLDEVDKRYRQYCHQMQIVVSSFDMVAGCGAAEPYTTLALRTISRHFRCLRDAISGQIQVTQRSLGEQEGIPRLRYVDQQLRQQKALQQLGVMRQAWRPQRGLPESSVSILRAWLFEHFLHPYPKDSEKIMLARQTGLTRNQVANWFINARVRLWKPMVEEMYKEEFGDSEMNCNLSSENNTVKCKKDDLVQESDNINNNNKWEETQDNLVTVDSVQVQPQAELDRGVNVENVVMDSGTGKLQGDQNQQRLGMNNNNNFYSISTNQNDGGLMGCSTHATYDLSELGNFTVGSHVSLALELRNCESDGFAMSDDAIRKRRNQALASSPETDLLDYHFTDSGKQQHRFGNPHLLHEFVV

SEQ ID NO: 31461 - protein, 489 aa, Glycine max
  Clone ID: TF_GmC2043_1.pep
NSARARAGSSCGGGENNNNNDGGKQGVELSTAQRQELQMKKSKLVTMLDEVEQRYRQYHHQMQVVITSFEQAAGVGAAKSYTALALKTISKQFRCLKDAISSQIKTTSKTLGEDDCLGVKVEGSRLRYVDHQLRQQRALQQLGMRTRGRTRGQRGLPERAVSVLRAWLFEHFLHPYPKDSDKVMLAKQTGLTRSQVSNWFINARVRLWKPMVEEMYLEEVKQEPNNSSQDNTTKRSKESSKELWSEANATAQESGAMRLDHINILQSKAESFNNNNNNQTTSPTEISNNSHNSLQSAGFHLADMQSPNKPIRSTSEMQNSPGSILSVDMEMKPRHHGETNNNTIITREGNNNTTKFGIESHGGGGGGFGAFPNMEDIGRFHHHHHHVTDQQSLAPRFHGNGVSLTLGLPHSTENNNNLSLSGTTHQHGFLSQNMHLGMRSTTNNANNEFCGAINTTPPSNSHSGTSYESIDIIQNRKRFAAQLLRDFVA

SEQ ID NO: 31462 - protein, 654 aa, Glycine max
  Clone ID: TF_GmC3921_3.pep
LEQQQIRRDKVRFEAAPLVGIEEEEPVYETAGMLSEMFNFPPATELLEQQHATATFRAARQAGEWYGNRQQQQQISGINADSAAAMQLFLMNPQTRSPSPPQTHATPSSTLHMLLPNPSSNSSLQGFTGSAAGGSFGQFTWVPESAHQQGGVVEGQGLSLSLSSSLEAAKAEELRMGDSGFLYYNHQQGGGGGGGSSSSSADQFQYKNNNNNHHQALHLQGAMGHDNNHQGHVGFGSSSVGVVNVLRNSKYAMAAQELLEEFCSVGRGQFKKSKFNRQNSNPNSNAGGGASPSSKDAPPPPPLSAADRIEHQRRKVKLLSMLDEVDRRYNHYCEQMQMVVNSFDLMMGFGAAGPYTALAQKAMSRHFRCLKEAITAQLKQSCEVLGDKDGAGSSGGLTKGETPMLKMLEQSLRQQRAFHQMGMMEQEAWRPQRGLPERSVNILRAWLFEHFLHPYPSDADKHLLARQTGLSRNQVSNWFINARVRLWKPMVEDMYQQELKEAEGAEEEREGNQSSSNNSGHQLAQTPTPSTTASTATAPPPPTTTPPTGKRSDSESDPSLAPINNTTSTAAMTVTASEVTQLSELPRTMVADESCRHGSLVATEFGTASAASEIGSTLIRFGTTAGDVSLTLGLRHAGNMPEKTPFSVRDFGGI

SEQ ID NO: 31463 - protein, 374 aa, Glycine max
  Clone ID: TF_GmC3921_5.pep
IEHQRRKVKLLSMLDEVDRRYNHYCEQMQMVVNSFDLMMGFGAAVPYTALAQKAMSRHFRCLKEAITAQLKQSCEVLGDKDGAGSSGGLTKGETPRLKMLEQSLRQQRAFHQMGMMEQEAWRPQRGLPERSVNILRAWLFEHFLHPYPSDADKHLLARQTGLSRNQVSNWFINARVRLWKPMVEEMYQQELKEAESAEEREKDQSNNISGNQAQIPTTPSAATTSTATATAPPPPPSTTTKTTKPTGKRSDTINAPESDPSQHLAMNNRQGFSENQAKKSTASTTTTTIASEVAPPVSQCFDDSDLPAHRLMASDDTCHLVTADFGTASASADIGSTLIRFGTTPGDVSLTLGLRHAGNMPEKSPFSVRDFGAI

SEQ ID NO: 31464 - protein, 869 aa, Glycine max
  unsure (1)..(869): unsure at all Xaa locations
  Clone ID: TF_GM240G09rgnA1.C1.o3.ma.pep
MFLIINRWEVGDNARCKNHRLFICGNSAYGAERWVMTLERMCERSPDGRRNIMHLTHSMVKMFCGNLDMKDDKNFPHLTRMNNGGTRIFKECTHPNEVRRRQIGEELGLDPEQVKFWFQNKKTHIRTINERLDTDALRLENERIQSENNKMRETLENLSCGSCGGRAMEPVKHQLSLQVLRGENILLTKECERITSLMANNGININPALLPVLPSSSSHDALGGSLLNQPVGIPAHNQFISNHDNHYIPAAIPTPFQDNPIVSPPSHNQDINPAPTIDQHIPTLDDPTLIGDNSPLISSFDYNIPALVTALDRNLPAMIHPHDQNNSIPSAEKEIHQVSNNSNNNLSALELDAVQILNNDMLPQPMKSLSKDMDSVQMLKIAEDAMEELMKLLSLNEPFWFRSLLDGKFNLRHDCYKRIFGRSNCLSGPHVRMESSKDSRVVKMSGAQLVEMFLNSDKWVDLFPTIVKKAQTIQVLESGSSGNRNGALQLVNAEMHILSHLVPSREFLFLRYCKQIEVGIWAIGDVSIDSSTYKTTVSHARRLPSGCLIQEKSSEGLCMVSWMEHVEVNEKMQTHNLFRDTICGNNAYGADRWVMTLERMCERFASYSAKTIPSCETGGGWLLFIFFARSKVILILIYLIFVRSPDVKRNIMHLTHRMVKMFCGNLDMQDNPNFPNLTRMNNNGVKLSIRVNHTGPNEPKGTIIGAAICFRVPLSPQIVFDNLIDNNKRAKVQSXNSYTWHEIQRISTGSNPGNCISIMRMLXGSMLVFAPFYMEGLDLIMKGEDSSLFPILPSGLTISWDYQSNKVPEGQSGQVGQSRGSLVTLMFQLLASSTSKIDNVDMKLIGSINTLVTSTVEKIKDALNCSNSK

SEQ ID NO: 31465 - protein, 289 aa, Glycine max
  Clone ID: TF_GmC419_206.pep
MVEHADLKDGGGDAVSWQIGRCKTEILQHPLYEQLLSAHVACLRIATPVDQLPRIDAQLAQSQNVVAKYAVFGHNNIVADDKELDQFMSHYVLLLCSFKEQLQQHVRVHAMEAVMACWELEQSLQSLTGVSPGEGTGATMSDDENDQVDSDANLFDCSFDGADSMGFGPLVPTESERSLMERVRQELKHELKQGYKEKIVDIREEILRKRRAGKLPGDTTSVLKAWWQSHSKWPYPTEEDKARLVQETGLQLKQINNWFINQRKRNWHSNPSTSTALKSKRKRSNAGDN

SEQ ID NO: 31466 - protein, 251 aa, Glycine max
  Clone ID: TF_GmC1293_1.pep
MLPGTTRGETPRLRIVDQSLRQQRAFQQISIMETHPWRPQRGLPERSVSVLRAWLFEHFLHPYPSDVDKHILARQAGLSRRQVSNWFINARVRLWKPMVEEMYLEEEKEQENDVASSDINVPEEDEKPTQEAPLLRIDSECMSSIVNDVTKSGKTIQNDNQMDAFGSVELDFSSYTHAHHSSGVSLTLGLQQHGESGVSLAFLPAATQSSMFYPRDQIQECQTVQYSLLDAEGQNMPFRNVMGTHLLHDLV

SEQ ID NO: 31467 - protein, 292 aa, Glycine max
  Clone ID: TF_GmC585_1.pep
MQEAGLGMGMGMMSGEVSAAGDHHRQVKAEIANHPLYEQLLSAHVSCLRVATPIDQLPLIDGQLSQSHHLLRSYASHHSHSLSPHDRQELDNFMAQYLIVLCTFKEQLQQHVRVHAVEAVMACRDIESTLQALTGVSLGEGTGATMSDDEDDLQMDGSLDQSSADGHDMMGFGPLLPTESERSLMERVRQELKIELKQGFKSRIEDVREEILRKRRAGKLPGDTTSVLKAWWQQHAKWPYPTEDDKAKLVEETGLQLKQINNWFINQRKRNWHSNSQSVNSLKSKRKREYAH

SEQ ID NO: 31468 - protein, 702 aa, Glycine max
  Clone ID: TF_GmC1515_1.pep
MATYFNGSTSEIQPSADGGLQTLYLMNPTYVPYADAPHHPTTLLVNPNAPNLANIPHAPPVSPNQQHHHVIHGVTSIIGSGNSDDHSRPSLIGENIAAFHGFSGGAGTASTTAPRLHYNLWGPVVDQPGTPSSSSGGGGFRRPSQQGLSLSLSSQQTNFRSVSGELDVAGQGHVAGIGNSPMSASIGVSGVIMGSKYLKAAQELLDEVVNVGKGIYKEEKFSESVKANRESTNSGAAGDGGDGSSGGGENSAGKQVVELSTAQRQELQMKKSKLVTMLDEVEQRYRQYHHQMQIVVSSFEQAAGYGAAKSYTALALKTISKQFRCLKDAISAQIKATSKTLGEDDCLGVKVEGSRLRYVDHHLRQQRALQQLGMIQPNAWRPQRGLPERAVSILRAWLFEHFLHPYPKDSDKVMLAKQTGLARSQVSNWFINARVRLWKPMVEEMYLEEIKEHEQGNGSENTKSKESSKELASTANVALDHLQSKHESFNNQNTSPTEISTSSSMSPMGGSLQSHSGFHLAGSSDMQIRSPNKPRSSEMQNSPSSILSVDMEMKHSGDHGNNRDANTKFGIERHHQQKDGYPLMTSNPNHGGGFGAFTMEDIGSRFNVTTEQLASRFHGNGVSLTLGLPHNENLSMSGTQQHGFLSQNIHLGRRLEMGTNGNEFCTINTAPPSSHSGTTYESIDIQNRKRFVAHQLLPDFVA

SEQ ID NO: 31469 - protein, 251 aa, Glycine max
  Clone ID: TF_GmC1117_2.pep
MPRVLPEAARTADESLSPLLQLPLIDAQLSQSHHLLRSYVSHNTLSLSPHHRQELDNFLAQYLIVLCTFKEQLQQHVRVHAVEAVMACRDIENTLQALTGVSLGEGTGATMSDDEDDLQMDFSLDQSSAEGHDMMGFGLPTESERSLMERVRQELKIELKQGFKSRIEDVREEILRKRRAGKLPGDTTSVLKNWWQQHAKWPYPTEDDKAKLVEETGLQLKQINNWFINQRKRNWHSNSQSVTSLKSKRKR

SEQ ID NO: 31470 - protein, 73 aa, Glycine max
  Clone ID: TF_LIB3242-236-Q1-J1-C12.pep
MSAETASGPTEDQVEILEYNFNKVDKHPDSTTLCLIAAEAGLSEEETQKWFKQRLAKWRRSEGLPSECRSVTD

SEQ ID NO: 31471 - protein, 479 aa, Glycine max
  unsure (1)..(479): unsure at all Xaa locations
  Clone ID: TF_GmC2101_1.pep
KEGNVVKTYYVGQLTSPASGLRSFEVLGSGKSNNDLSTTERQEIQIKKAKLINMLDEVEQRYRQYXHNQMKIVISSFEQAAGIGSARTYTALALQTISKQFRCLKDAITGQIRAANKSLGEEDCFGAKIEGSRLKYVDHHLRXQRAFQHLRMIHHNAWRPLRVLARIALSVLPDWKFEHFHNPYTKDSDKHMLAKQTGLTRSQVSNWFINARVRLWKPMVEEMYLEEMKEHELNGSEEKSSKSGEDPATKTTSPQEKRTSSEIESKSFNSKQDVSKQSQNTPILPTSPPSISPIGGSVKNQSGFSFMGSSELDGITQGSPKKPRNHEILHSPNRVPSINMDVKANEANNEQQLSMDHERQNNRDSYSFMGNQTNFISGFGQYPIEEIGRFDAEQFTPRFSGKNGVSLTLGLPHCDTLSGTHQSFLPNQNIQLGRGLDIGEPNQFGALNNSNSHNSAAFESINMQNPKRFAAQLLPDFVA

SEQ ID NO: 31472 - protein, 345 aa, Glycine max
  Clone ID: TF_GmC637_1.pep
MAFHDHLQHEIAFQRFTEEQELTENRDMQQRLPPPTWLNNVNARQQNFLDTEKSVDRNNRSESNCESEDLREYKADILGHPLYDQLLSAHVSCLRIATPVDQLPRIDAQLQQSQRVVEKYSALAHNGVVDEKELDQFMTHYVLLLCAFKEQLQQHVRVHAMEAVMACWDLEQSLQSLTGVSPGEGTGATMSDDEDDQAESNANLYEGSLDGGETLGFGPLVPTESERSLMERVRHELKHELKQGYKEKIVDIREEILRKRRAGKLPGDTTSLLKAWWQSHSKWPYPTEEDKARLVQETGLQLKQINNWFINQRKRNWHTNNPSSSSNSKSKRKSSAGEASNQSFM

SEQ ID NO: 31473 - protein, 370 aa, Glycine max
  Clone ID: TF_GmC637_4.pep
MAFHDHLPHEITFQPFTEEQQLGQSRDMQRLLPLSGGAPTWLNNSTAATLRQQNFLHLQPESAATTQQNDDVRGGGGSGMDRNRTESNSEPDDLAEYKADILGHPLYDQLLSAHVSCLRIATPVDQLPRIDAQLQQSQRVVDKYSGIGNGNGVVDDKELDQFMTHYVILLCAFKEQLQQHVRVHAMEAVMACWELEQSLQSLTGVSPGEGTGATMSDDEYYQAESNANLFEGSMDGADSLSFGPLVPTETERSLMERVRQELKHELKQGYKDKIVDIREEILRKRRAGKLPGDTTSLLKAWWQSHSKWPYPTEEDKARLVQETGLQLKQINNWFINQRKRNWHTNPSSSSGSKSKRKSSGAGETSNQSFM

SEQ ID NO: 31474 - protein, 651 aa, Glycine max
  Clone ID: TF_GmC2011_1.pep
PTRLRRLEKELSRELGLEPLQVKFWFQNKRTQMKTQHERHENTNLRTENEKLRADNMRYREALSNASCPNCGGPTAIGEMSFDEHHLRLENARLREEIDRISAIAAKYVGKPVVNYSNISPSLPPRPLELGVGGAGFGGQPGIGVDMYGAGDLLRSISGPTEADKPIIIELAVAAMEELIGMAQMGEPLWLTTLDGTSTMLNEDEYIRSFPRGIGPKPSGFKCEASRETAVVIMNHVNLVEILMDVNQWSTVFSGIVSRAMTLEVLSTGVAGNYNGALQVMTAELQLPTPLVPTRESYFVRYCKQHADGTWAVVDVSLDNLRPGPSARCRRRPSGCLIQEMPNGYSKVTWVEHVEVDDRGVHNLYKQLVSSGHAFGAKRWVATLDRQCERLASAMATNIPTVDVGVITNQDGRKSMMKLAERMVISFCAGVSASTAHTWTTLSGTGADDVRVMTRKSVDDPGRPPGIVLSAATSFWLPVPPKRVFDFLRDENSRNEWDILSNGGVVQEMAHIANGRDTGNCVSLLRVNSANSSQSNMLILQESCTNSTGSFVIYAPVDIVAMNVVLNGGDPDYVALLPSGFAILPDGTTSHNGSGGIGETGPSGSLLTVAFQILVDSVPTAKLSLGSVATVNNLIACTVERIKASLSGEPA

SEQ ID NO: 31475 - protein, 538 aa, Glycine max
  Clone ID: TF_GmC1817_1.pep
MLNTLHLLLHHDQRIRSHLWFELTPSVHPPSSTTTVPQITKTTQRATNSALGQPCLLSLALSPPLAYSLLREFGSAWARHPVWGVPVARLAQQMLSQDGYVSSNSKVASVYQQGHFLVKNSKFLVPAQDLLNEFCSLCAKQSDLGKPTKSLKKQWEDQENNGVGSSKKHSLTSLEFVELQKRKTKLLSMLEEVDRRYKHYRNQMKSVVSSFEAVAGNGAATVYSALALKAMSRHFRCLKDGILSQIQATRKAMGEKDPVAPGTTRGETPRLKVIDQTLRQQRAFQQMSMMETHPWRPQRGLPERAVSVLRAWLFEHFLHPYPSDVDKHILARQTGLSRGQVSNWFINARVRLWKPMVEEMYLEEVKDPENNIASSEGATDQDNDINPNNVQYPPPPLSSRSEDQKPSLVRIDSECASSIINNHSTPDNKNDPKGQEQCFGSVELDFSSYTHHSSGMVSYGSSDQNGNNNQSGVSLTLGLQQHGVSLAFPPATQSSLYYPRDQIEDCQPVHQYSLLDGEGQNLPYRNLMGAQLLHDLAG

SEQ ID NO: 31476 - protein, 121 aa, Glycine max
  unsure (1)..(121): unsure at all Xaa locations
  Clone ID: TF_LIB4280-027-R1-K1-D7.pep
MEAEAENNDVKKEENSNDNNNNNNNESNSKIGNSSEGLSKPKRQMKTPFQLETLEKAYAVENYPSETMRXELSEKLGLSDRQLQMWFCHRRLKDKKELPSKKPRKGSGVAGFSGGGAQVGA

SEQ ID NO: 31477 - protein, 212 aa, Glycine max
  Clone ID: TF_LIB4366-009-R1-K1-A7.pep
MMEPQQQQQQAQGSQQQQQNEDGGSGKGGFLSRQSSTRWTPTNDQIRILKELYYNNGIRSPSAEQIQRISARLRQYGKIEGKNVFYWFQNHKARERQKKRFTSDHNHNNVPMQRPPTNPSAAWKPDLADPIHTTKYCNISSTAGISSASSSVEMVTVGQMGNYGYGSVPMEKSFRDCSISAGGSSGHVGLINHKLGWVGVDPYNFSTYANFF

SEQ ID NO: 31478 - protein, 91 aa, Glycine max
  unsure (1)..(91): unsure at all Xaa locations
  Clone ID: TF_uC-gmroLIB3259P256d10a1.pep
KKGSLSLEQIKALEKNFWVXNKLYPXRKVKLPQKLGLHPKQKTVWFPTPRPRWKPPPLGRDKKFRGLWNFFLPQFFGGVDPKNPCYILRGG

SEQ ID NO: 31479 - protein, 110 aa, Glycine max
  Clone ID: TF_10847932.pep
MDEGLSGFCIISSSGSVRGKSGTKCGRWNPTTEQVKLLTELFRSGLRTPSTDQIQKISTQLTFYGKIESKNVFYWFQNHKARERQKNRKLSFDDHKDLICRQNAPSTQSK

SEQ ID NO: 31480 - protein, 235 aa, Glycine max
  Clone ID: TF_GmC1705_1.pep
IRIHSLAQHFAFQPRQVAIWFQNRRTRFKTKQLEKDYGVLKASYDRLKSDYESFGQEIEMQNPRVHDSESKHCIKDGEKQEHSDEKSSPDDAVNSSSPHNNKEPMDLLIISKNATTTTTSENGTKVLSPLPLPIMVTCCKQEDANSAKSDVLDSDSPHCTSFVEPADSSHAFEPEDHSEDFSQDEEDNLSENLLMTFPSSCCLPKVEEHCYDGPPENSCNFGFQVEDQTFCFWPY

SEQ ID NO: 31481 - protein, 244 aa, Glycine max
  Clone ID: TF_GmC1293_3.pep
MMYYQSKSALKRTSSGKKVIAVVVPQRTTSLSSLEYVELQKRKTKLLAMLEEVDRRYKHYRNQMKGVVSSFEAVAGNGAATVYSALALKAMSRHFRCLKDGIMDEIEATRKGMGEKDHVAAVPGTTRGETPRLRIVDQSLRQQRAFQQISIMETHPWRPQRGLPERSVSVLRAWLFEHFLHPYPSDVDKHILARQAGLFRRQVSNWFINARVRLWKPMVEEMYLEDEKEHEHDVASSILMFPRG

SEQ ID NO: 31482 - protein, 138 aa, Glycine max
  Clone ID: TF_GmC2011_2.pep
MQAGIMMIPARNMPSMIARNNNVVGLRNYKPLRNLKRSIAIIMFQPNLMDALEMGQNTSESEVPRILEDEFDSATKSGSENHEGASGEDQDPRPNKKKRYHRHTQHQIQEMEAFFKECPHPDDKQRKELSRELGLEPL

SEQ ID NO: 31483 - protein, 133 aa, Glycine max
  Clone ID: TF_LIB3108-022-Q1-K1-A9.pep
HPGGEHTGEKDRTFETSFIREQWALQQLRRNEQQSWRPQRGLPEKSVSVLRAWMFQNFLHPYPKDNEKHLLAIQSGLTRSQVSNWFINARVRLWKPLIEEMYSEVNKKNRPIEGSGCDSRNYASIGNQRIQMN

SEQ ID NO: 31484 - protein, 68 aa, Glycine max
  Clone ID: TF_GmC419_97.pep
GSRTSVLKAWWQSHSKWPYPTEEDKARLVQETGLQLKQINNWFINQRKRNWHSNPSTSTALKSKRKRS

SEQ ID NO: 31485 - protein, 138 aa, Glycine max
  unsure (1)..(138): unsure at all Xaa locations
  Clone ID: TF_GmC228470_1.pep
IIVNVCIACRTKLKQTEVDCWYLKRCCGALTEENRSFRNEGQEIRALKTSKCNYKQLPSTXMCPSCERVATNSTSTSLSISATINATNSGAMASVKTSNNNNNNDSTSKAIGFPFGKPRFHPFVHSSQQPHQHQSTAS

SEQ ID NO: 31486 - protein, 193 aa, Glycine max
  Clone ID: TF_GmC143165_1.pep
VTRRYKQYHQQMQMVVQSFESVVGLSSATPYVSLALKSISKHFRCLKNAISDQLKLTCEVLGEDYSIPTTSTGSKFDNNVARLRCMDQNFQKNKSGGANINFLEPQQHVWRPQRGLPERSVAILKAWLFEHFLHPYPTDTDKHMLASQTGLSRHQVSHWCINARVRVWKPMVEEIHMLETKGATEAHQHQTSS

SEQ ID NO: 31487 - protein, 76 aa, Glycine max
  unsure (1)..(76): unsure at all Xaa locations
  Clone ID: TF_701134378H1.pep
MVPIDGRGRVRRGSLRRXRRLSVXQVXALEKNFEVEXKLEPERXVKLAQXLGLQPXQVAVWFXNRRAXWKTRXWRE

SEQ ID NO: 31488 - protein, 155 aa, Glycine max
  unsure (1)..(155): unsure at all Xaa locations
  Clone ID: TF_LIB4392-003-Q1-K1-B8.pep
MGDFIFSFKTQQQEHHAHHQRAKHIFFKKRLTEDQVSILEKCFSSNMKLEPEQKFHLANQLGLPPRQVAIWYQNKRARWKTQSLEVDHGVLQAGXENVVAEKKQLEKDVERLKAELKKAQEMLLITNSVKGGDHNNNNACEFSTSFEEGGSWGGA

SEQ ID NO: 31489 - protein, 131 aa, Glycine max
  Clone ID: TF_GmC53_2.pep
QILSTVTVLSSSESTCQIQIRFISFLIYTNSARGKYGGYLSSLRKEFLKKRKKGKLPKDARMILMDWWNTHYRWPYPTEEEKVQLSEMTGLDQKQINNWFINQRKRHWKPTEDMRFAIMDGVSGSGLGGPM

SEQ ID NO: 31490 - protein, 766 aa, Glycine max
  Clone ID: TF_GmC378_1.pep
MQNSSCFLCSTQRKMEGPSEIGLIGENFDAGLMGRMRDDEYESRSGSDNFEGASGDDQDGGDDQPQRKKRYHRHTPHQIQELEAFFKECPHPDEKQRLDLSKRLGLENKQVKFWFQNRRTQMKTQLERHENIMLRQENDKLRAENSLIKEAMSNPVCNNCGGPAIPGQISFEEHQIRIENARLKDELNRICVLANKFLGKPISSLTSPMALTTSNSGLELGIGRNGIGGSSTLGTPLPMGLDLGDGVLGTQPAMPGVRPALGLMGNEVQLERSMLIDLALAAMEELLKMTQAESPLWIKSLDGEKEIFNHEEYARLFSPCIGPKPAGYITEATRETGIVIINSLALVETLMDANRWAEMFPSMIARAINLDVISNGMGGTRNGALQVMHAEVQLLSPLVPVRQVYGCKKTTEGAEGVWAVVDVSIEIGHDAANAQPSISCRRLPSGCIVQDMPNGYSKVTWLEHWEYDENVVHQLYRPLLSSGVGFGAHRWIATLQRQCECLAILMSSSISSDSHTALSQAGRRSMLKLAQRMTSNFCSGVCASSARKWDSLHIGTLGDDMKVMTRKNVDDPGEPPGIVLSAATSVWMPVSRQRLFDFLRDERLRSEWDILSNGGPMQEMVHIAKGQGHGNCVSLLRANAVNANDSSMLILQETWMDASCSVVVYAPVDVQSLNVVMSGGDSAYVALLPSGFAILPDGHCNDNGCNGSLQKGRGSDDGSGGSLLTVGFQILVNSLPTAKLTVESVDTVNNLISCTIQKIKAALRVA

SEQ ID NO: 31491 - protein, 127 aa, Glycine max
  Clone ID: TF_LIB3242-270-Q1-J1-B8.pep
MSLSGIENKCNEVHGDDELSDDGVFQSGEKKKRLNLEQVKALEKSFDQGNKLEPERKVQLAKALGLQPRQVAIWFQNRRARWKTKQLEKEYEVLKKQFEAVKADNDVLKVRNQKLQAELQAVKSKDW

SEQ ID NO: 31492 - protein, 262 aa, Glycine max
  Clone ID: TF_GmC1019_2.pep
MVNAMEWQKQRCWQPNRNAEMMCVKVMTDEQLEILRKQIAVYATICEQLIEMHKNISAHQDLAGIRLGNMYCDPLLGSGGLKIASRQRWTPTAMQLQILERIFDQGIGTPTKEKIKEITNELSQHGQISETNVYNWFQNRRARSKRKQQNVAPSANAESEVETEVDSKDKKTKPDEFQAPPSVSAGPADNLGFQNHDSLQYLNPESNKPDSVFPSDGTRNFHHVPAFDGLLSNSRSNYLTGKLETPENYELYQPAGDYNIAG

SEQ ID NO: 31493 - protein, 190 aa, Glycine max
  unsure (1)..(190): unsure at all Xaa locations
  Clone ID: TF_GmC597467_1.pep
MALCMQSQQRDSASNKLLMDCGKYVRYTPEQVEALERVYIECPKPSSSRRQQIIRECPLLANIETKQIKVWFQNRRCREKQRKEASRLQTVNRKLSAMNKLLMEENDRLQKQVSQLVYDNGFMKQQIHTASATTTTDNSCESVVVSGQRQHQNPKIQHPQWDANNPAGLLAIAQETLAAXLSKATGTAVN

SEQ ID NO: 31494 - protein, 524 aa, Glycine max
  Clone ID: TF_GmC1502_1.pep
ESSELQSEENKVSNEKNKKRKLKTPAQLKALENFYNEHKYPTEEMKLVLAEELGLTEKQISGWFCHRRLKDKRLMKDEAVANGRQDRSSGVIQDRGSGLGQDSCGSSKHADHRYLDPKEVESHGLYNHELSVADMTHRRRNHYPENVSGVDDTSSESSSFLQERFSQGQDPYDMEPSRHLTPNGALPPLNPKGAVKMGHKPSGYLKVKGEIEHAAITAVRKQLGRHYLEDGPLLGIEFDPLPPGAFECQTADPANEPYSVTNPLLSNSPEISAAKRQPSISSRYDSYYTKFRSQDSHMEGADFGSLHESDFQDKQDKKACQNIKQRQSLYGYTNHFPGRNTFPDLYEDSTGEASAYNSNKSHRMSTKHGVEGMRSDSASNHSDHYEEKLTVKQKTLMLHGYDNINPKNIQRSEHVKSKPSSSIHNSRVPMDTEERGLSARMAKEEMFKGDRKAKNTYCNVDGAGMLSNEIMVAKRAKVDMLQQYNVKKSPVAEMEQRKIQRSAADLPSSFSEDETADTNSSLDY

SEQ ID NO: 31495 - protein, 104 aa, Glycine max
  Clone ID: TF_GmC1502_3.pep
MEESSELQSEENKVSNEKNKKRKLKTPAQLKALENFYNEHKYPTEEMKLVLAEELGLTEKQISGWFCHRRLKDKRLMKDEACANGRQIVQGCHPDRAVDLGRFM

SEQ ID NO: 31496 - protein, 310 aa, Glycine max
  Clone ID: TF_GmC18168_1.pep
FGSRTFADFCLSLSYHHNSQSSETERDGERGGIQKQLQRWQQSGNVNVNVNVDANGELMYVKVMTDEQLETLRKQIAVYGTICEQLIEMHRTLSAQQDLAGVRLGNIYCDQLMTSGGHKITSRQRWTPTPVQLQILERIFDQGNGTPSKEKIKEITAELGQHGQISETNVYNWFQNRRARSKRKLQNVAPYSTESEVDTEVDSKNKKTKAEEEFQSQHNITTSGGAEKLCFQNPQVYSDHLHYLNPDSNKPYSMCQSDCNLKSTRNSSHVSVFNEMLSNSRSEYVGGKMEVAGSVSYNLFHQTGDCNLAG

SEQ ID NO: 31497 - protein, 322 aa, Glycine max
  Clone ID: TF_GmC30_1.pep
MKRLSSSDSSSALMTICPSTEEHSPRNSQHMYGREFQSMLDGLDEEGCVEEPGYQSEKKRRLSVDQVKALEKNFEVENKLEPERKVKLAQELGLQPRQVAVWFQNRRARWKTKQLERDYGVLKANYDALKLNFDTLDQDNEALRKQVKELKSRLLQEENTGGSGVSVKEEIITRPADSEDKTMEQSKSDPSSETSNINPSSESEEDHLNYECFNNNDDCVGGTAASLLQVDFKDGSSDSDGSSAILNEDNMYSPLKFNNCSISTSPSSSSMMNCFQFQKPYHHHAQYVKMEEHNFLSADEACNFFSDEQAPTLQWYCPEQWS

SEQ ID NO: 31498 - protein, 322 aa, Glycine max; identical to SEQ ID NO: 31497
  Clone ID: TF_GmC30_3.pep

SEQ ID NO: 31499 - protein, 133 aa, Glycine max
  Clone ID: TF_GmC30_5.pep
ICIGLEEHSPRNSQHMYGREFQSMLDGLDEEGCVEEPGYQSEKKRRLSVDQVKALEKNFEVENKLEPERKVKLAQELGLQPRQVAVWFQNRRARWKTKQLERDYGVLKANYDALKLNFDTLDQDNEALRKQVE

SEQ ID NO: 31500 - protein, 322 aa, Glycine max
  Clone ID: TF_GmC30_6.pep
MNYLMGEEGEVVRKQGQRGVEEHSPRNSQHMYGREFQSMLDGLDEEGCVEEPGYQSEKKRRLSVDQVKALEKNFEVENKLEPERKVKLAQELGLQPRQVAVWFQNRRARWKTKQLERDYGVLKANYDALKLNFDTLDQDNEALRKQVKELKSRLLQEENTGGSGVSVKEEIITRPADSEDKTMEQSKSDPSSETSNINPSSESEEDHLNYECFNNNDDCVGGTAASLLQVDFKDGSSDSDGSSAILNEDNMYSPLKFNNCSISTSPSSSSMMNCFQFQKPYHHHAQYVKMEEHNFLSADEACNFFSDEQAPTLQWYCPEQWS

SEQ ID NO: 31501 - protein, 172 aa, Glycine max
  Clone ID: TF_GmC73539_1.pep
MEFGSGSPGDHHHHHDGSSDSQRRKKRYHRHTANQIQRLESMFKECPHPDEKQRLQLSRELGLAPRQIKFWFQNRRTQMKAQHERADNCALRAENDKIRCENIAIREALKNVICPSCGGPPMNDDCYFDEQKLRLENAQLKEELDRVSSIAAKYIGRPISQLPPVEAIDICC

SEQ ID NO: 31502 - protein, 156 aa, Glycine max
  unsure (1)..(156): unsure at all Xaa locations
  Clone ID: TF_GmC391285_1.pep
ARGLGGAARVLDVNLFRAATAEDGDDGTSLSSSPNSAVSPFQMDFCTRNCNAEFGGRNKREQQEAEGRASDDDENGSTRKKLRLSKEQSAFLEESFKEHTTLNPKQKLALAKQLNLRPRQVEVCVXNRRARTKLKQTELGCEYLKKCCENLNRRRL

SEQ ID NO: 31503 - protein, 284 aa, Glycine max
  Clone ID: TF_GmC4473_2.pep
MESGRIFFGASASSGNNMLFLGNTELAFRGRSIMSMEEASKRRPFFTSPDELYDEEYYEKQSPEKKHRLSSEQVHLLEKSFEEENKLEPERKTQLAKKLGLQPRQVAVWFQNRRARWKTKQLERDYDVLKSSYDTLLSSYDSIMKENEKLKSEVVSLNEKLQVQAKEVPEEPLCDKKVDPIPVDEDMAPIFGTRVEDHLSSGSVGSAVVDEGSPQVVVDSVDSYILADNYGGCVGPVERVQSEEEDGSDDGRSYLDVFVVSETEHQNHEEGETLGWWTNMYYVG

SEQ ID NO: 31504 - protein, 281 aa, Glycine max
  Clone ID: TF_GmC444_2.pep
MAFFPANFMLQTPHQDDHQPPPSLNSIITSCAPQEYHGGGASFLGKRSMSFSGIELGEEANAEEDLSDDGSQAGEKKRRLNMEQVKTLEKSFELGNKLEPERKMQLARALGLQPRQIAIWFQNRRARWKTKQLEKDYDLLKRQYEAIKSDNDALQAQNQKLQAEILALKSREPTESINLNKETEGSSSNRSENSSEIKLDISRTPAIDSPLSTQQNNNNRTLFPSSARPTGVAQLFQTTPRPEIQCQKIDHMVKEESLSNMFCAIDDQSGLWPWLEQQHFN

SEQ ID NO: 31505 - protein, 300 aa, Glycine max
  Clone ID: TF_GmC444_3.pep
NILSEDVVQHKTCNEMAFFPANFMLQTPHHDDHHHHQPPPSLTSILPTCAPQEYHGGVTILGKRSMSFSSGIEHGEEANNAEEDLSDDGSQAGEKKRRLNMEQVKTLEKSFELGNKLEPERKMQLARALGLQPRQIAIWFQNRRARWKTKQLEKDYDVLKRQYEAVKSDNDALQAQNQKLQAEILALKSREPTESINLNKETEGSCSNRSENSSDIKLDISRTPAIDSPHSTHQQSRPFFPPSSARPAGVAQLFQTSSRPDLPSCQKIDQMVKEESLSNMFCGMDDQSGFWPWLEQQHFN

SEQ ID NO: 31506 - protein, 159 aa, Glycine max
  Clone ID: TF_GmC444_4.pep
RFCGRHKTCNEMAFFPANFMLQTPHHDDHHHHQPPPSLTSILPTCAPQEYHGGVTILGKRSMSFSSGIEHGEEANNAEEDLSDDGSQAGEKKRRLNMEQVKTLEKSFELGNKLEPERKMQLARALGLQPRQIAIWFQNRRARWKTKQLEKDYDVPKRQH

SEQ ID NO: 31507 - protein, 308 aa, Glycine max
  Clone ID: TF_GmC3110_1.pep
MGEKDDGLGLGLSLKLGWGENNDNNNNQQQHPFNVHKPPQSVPNQRVSVNSLFHFHDRSSEMRSFFRGIDVNLPPPPPSAALAAFDDENGVSSPNSTISSINGKRSEREGNGEENERTSSSRGGGGSDDDEGGACGGDADADASRKKLRLSKEQALVLEETVKEHNTLNPEQKQALAKQLNLMPRQVEVWFQNRRARTKLKQTEVDCEYLKRCCENLTEENRRLQKEVQELRALKLSPQLYMQMNPPTTLTMCPSCERVAVSSASSSSSATMPSALPPANLNPVGPTIQRPMPVNPWAAMLNQHRGRP

SEQ ID NO: 31508 - protein, 132 aa, Glycine max
  unsure (1)..(132): unsure at all Xaa locations
  Clone ID: TF_jC-gmle01810092g05a1.pep
ADLICIGLDEHSPRNSLHMCGMEFLSMLDGLDEERCGDXPRHYSVKRLRLTVLQVYAMXKNFDXDNTLAPETKVKLAQELGLPPTPVAIWIQNLRTRWRTILLERDYGDLIANDDALKLNYGTLNEDNLILL

SEQ ID NO: 31509 - protein, 166 aa, Glycine max
  unsure (1)..(166): unsure at all Xaa locations
  Clone ID: TF_jC-gmro02910022c12d1.pep
MERGDCQFTVVPPRQYDEAQFMHQLMVAGDQQDPAGAGRGAAAAGGERKRRFTEEQVRSLETTFHARRAKLEPREKAELARELGLQPRQVAIWFQNKRARWRSKQLEHDYAALRAQFDAMHARVESLRQEKIALAAQVDELXGRLNERQDQSGSCEVNDAEAAADD

SEQ ID NO: 31510 - protein, 345 aa, Glycine max
  Clone ID: TF_GmC1705_3.pep
MASGKLYAGSNMSLLLQNERLPCSSEVLESLWAQTSNPASFQGSKPVVDFENVSGSRMTDRPFFQALEKEENCDEDYEGCFHQPGKKRRLTSEQVQFLERNFEVENKLEPERKVQLAKELGLQPRQVAIWFQNRRARFKTKQLEKDYGVLKASYDRLKSDYESLVQENDKLKAEVNSLESKLILRDKEKEENSDDKSSPDDAVNSSSPHNNKEPMDLLIISKNATTTTTSENGTKVLSPLPLPIMVTCCKQEDANSAKSDVLDSDSPHCTSFVEPADSSHAFEPEDHSEDFSQDEEDNLSENLLMTFPSSCCLPKVEEHCYDGPPENSCNFGFQVEDQTFCFWPY

SEQ ID NO: 31511 - protein, 326 aa, Glycine max
  Clone ID: TF_GmC1520_1.pep
MAAGTVFCAAATAASNLTTTTFLHNQTPPSTSSQPPLDSLFLSASSPFLGSRSIVSFGDVQGGKGCNDSFFRPYDENGDEDMDEYFHQPEKKRRLSVEQVKFLEKSFDEENKLEPERKIWLAKELGLQPRQVAIWFQNRRARWKTKQMEKDYDSLQASYNDLKANYDNLLREKDKLKAEVARLTEKVLGREKNESHLEQAETNGLQEPLHKSLVDSASEGEGSKVTFEACKQEDISSAKSDIFDSSESPQYTDGVHSALLETGDSSYVFEPDRSDVSQDEEDNLSKTLLPHYIFPKLEDVDYSDPPHGSCNFGIPEEDQAIWSWPY

SEQ ID NO: 31512 - protein, 311 aa, Glycine max
  Clone ID: TF_GmC952_1.pep
MKRLGSSDTLGALMTICPPTDEHSPRNNHAYGREFQSMLEGLDEEGCVEEPGHHSEKKRRLSVDQVKALEKNFEVENKLEPDRKLKLAQELGLQPRQVAVWFQNRRARWKTKQLERDYGVLKANYESLKLNYDTLQQDDEALLKEIKELKSRLVQEENNNNTESDVSVKEEMLTTTLCETAIPGSDTKELSYECFNKSDEVGGGSSVFHVDFKDGSSDSDSSAILNEENNNHSPNNNAAISSCGVLQSHGLLSSPSSSSMNNCFQFQKQYQTTTQYVKMEEHNFLSADEACNFFSDEQAPTLQWYCSEEWS

SEQ ID NO: 31513 - protein, 312 aa, Glycine max
  Clone ID: TF_GmC952_2.pep
MKRLGSSDSLGALMTICPPTDEHSPRNNHAYGREFQSMLEGLDEEGCVEEPGHHSEKKRRLSVDQVKALEKNFEVENKLEPDRKLKLAQELGLQPRQVAVWFQNRRARWKTKQLERDYGVLKANYESLKLNYDTLQQDHEALLKEIKELKSRLVQEENNNNTESDVSVKEEMLTTTLCETAIPGSDTKELSYECFNKSDEVGGGSSVFHVDFKDGSSDSDSSAILNEENNNHSPNNNAAISSCGVLQSHGLLLSPSSSSMNNCFQFQKQYQTTTTQYVKMEEHNFLSADEACNFFSDEQAPTLQWYCSEEWS

SEQ ID NO: 31514 - protein, 216 aa, Glycine max
  unsure (1)..(216): unsure at all Xaa locations
  Clone ID: TF_GmC1502_2.pep
MEESSELQSEENKVSNEKNKKRKLKTPAQLKALEDFYNEHKYPTEEMKLVLAEELGLTEKQISGWFCHRRLKDKRLMKDEAVANGRQDRSSGVIQDRGSGLGQDSCGSSKHADHRYLDPKEVESHGLYNHELSVADMTHRRRNHYPENVSGVDDTSSESSSFLQERFSQGQDPYDMEPSRHLTPNGALPPLNPKGAVKMGHKPSXYLKVKGEIEHA

SEQ ID NO: 31515 - protein, 154 aa, Glycine max
  Clone ID: TF_GmC30_10.pep
MKRLNSSDSSTALMTIFPSSSTEEHSPRNSHHMYGREFRSMLDGLDEEGCVEEPGHQSEKKRRLSVEQVKALEKNFEVENKLEPERKVKLAQELGLQPRQVAVWFQNRRARWKTKQLERDYGVLKANYDALKLNFGTLNQDNEALRKQIKELKS

SEQ ID NO: 31516 - protein, 92 aa, Glycine max
  Clone ID: TF_GmC75260_1.pep
MEEATEFHSEENKLSMEKNKKRRLKTPAQLKGLEDFYNDNKYPTEEMKSELADELELTEKQISGWFCHRRLKDKKMLNDEVCANGRHDRSSG

SEQ ID NO: 31517 - protein, 191 aa, Glycine max
  unsure (1)..(191): unsure at all Xaa locations
  Clone ID: TF_GmC451723_1.pep
MGADMSNNNNPPPTSHAKDLFASPALSLSLAGIFRHAGVAAADEAATSVEEGAGGSGGAADRLEEISSENSGPTRSRSEDDLSGGEADPEDDDDAHGDSEDKKTKKKKKKYHRHTAEQIREMEALFXESPHPDEKQRQQLSNQLGLAPRLVKFWFQNRRTQIKAIQERHEYSLVKTELDRLREENKAMRET

SEQ ID NO: 31518 - protein, 283 aa, Glycine max
  Clone ID: TF_GmC1235_1.pep
MGLDQDANSSGLHLVLGLSLTASVKETTQSTKPDDDHHLCVIKPTPTKPYPSNEPSLTLGLSGKGYHVPNHVAINKVYCEDPLEFSRQTSPHSVVSSFSTGRVIKRERDLSCEDMEVEAEERVSSRVSDEDEDGTNARKKLRLTKEQSALLEESFKQHSTLNPKQKQALARRLNLRPRQVEVWFQNRRARTKLKQTEVDCEFLKKCCETLKDENRRLKKELQELKALKLAQPLYMPMPAATLTMCPSCDRLGGVNDNGSNKSPFSMAPKPHFYNPFANPSAAC

SEQ ID NO: 31519 - protein, 309 aa, Glycine max
  unsure (1)..(309): unsure at all Xaa locations
  Clone ID: TF_GmC66552_1.pep
MSFHDTSNTGLGLGLGLGLVSFHDQSGNCMKSTNNDPMRESHKIKKVENPSSKCNNTYPSLTLGPPDDDDGDDDDEVNNNNQPSSKTESYEYFRPQVSSPSAVSSFSNSSSIKRERDQVLGGEEFEVVVEKVPTRVVGDVDEDGNPRKKLRLTXEQAAVLEENFREHSTLNPKQKQELAMKLNLRARQVEVWFQNRRARTKLKQTESDCELLKKCCDTLTVENKKLQKELQELKSMQATPVPLYMQIPAATLSICPSCERICGGNENNGDNNNNGSSHTTTLLIGSKTHHHSFYKSNNYPFPHSSSAAC

SEQ ID NO: 31520 - protein, 159 aa, Glycine max
  unsure (1)..(159): unsure at all Xaa locations
  Clone ID: TF_LIB4167-033-R1-K1-F6.pep
FWEARMYGDCQVMSSMGGNVVVNSDTLFSSSIQNSSFNFIPTMPFQPFPSMKEEDGILRGKEEMESGSGSEQLVEDKSGYEQESHEEPTKKKRYHRHTARQIQEMESLFKECPHPDDKQRLKLSHELXLKPRQVKFWFQNRRTQMKAQQDRADNMILRA

SEQ ID NO: 31521 - protein, 266 aa, Glycine max
  Clone ID: TF_GmC1019_1.pep
MVNVMEWQKQRWQPNGNAEMMYVKVMTDEQLETLRKQIAVYATICEQLIEMHKNISSHQDLAGIRLGNMYCDPLLGSGGHKIASRQRWTPSAMQLQILERIFDQGTGTPTKEKIKEITNELSQHGQISETNVYNWFQNRRARSKRKQQNVAPSANAESEVETEVDSKDKKTKPDEFQSPPSVSAVPADDNLGFQNHGSLQYLNPESNKPDSVFPSDASLRSTRNFNHVPVFDGLLSNSTSDYLTGKMEAPENYDLYQPAGDFNMAG

SEQ ID NO: 31522 - protein, 782 aa, Glycine max
  Clone ID: TF_GM240G09rgnA1.C1.o4.ma.pep
MYPSNLGGSGRGNRLNHATVSKLEAIFRECPYPNENRRRQISEELELSLNQVKFWFQNRKTKLKVVYYFLYDASFLRTIIYTLVLCNFQAISERIDNNALRRENENIQSENLLMRESLQNAFCLSCGGLPVGSVERKLQLQSLKAKNIQLAKEARGRLLNPIVGLPSPYQHSHVLSTPGFNQDIPAPAPALDCYIPDPPSDDVALDYCIPTPASVLAVDHSIPALASDPWLGQDIPHLPTLATLDQDIPPLGQDTSTLPQDHMPKDLDQELDALRGILNNDLIFQSIINQRIDLDNAMMSQIANNAIEELIKLLDMNQPFWSIHDWKLVLKRDNYQSILGRRHCLPGPHARIESSKDSRIVDMNAEQLVQMFMNLEKWVDLFPTIVTKAQTIQVLENGLVGNRSGALLLINAEMHILSHLVPTRQFYFLRYCKQIKEGVWVIGDVSIDSLEYKTIVPRIWRRPSGCLIQEMNHGLCKVSWVEHVEVDDKMQTHQLFTDVICCNNAYGAERWLSTLKRMCERFACASAETIPSCDESGEAILSLEGKKSVMHLAHRMVKTFCRTLDVSDCENFPYLTRMMNNGEVTIIVRKNNSEQDVPQGLILSAATSFLLPHSPENVFDFLIDNKKRAKWEPFWYGKPGHEIQRISTGNNPGNFISITKALGPSDNNMIVLQESYADGLGSMMVYSAFDTETMNFAMRGEDTSQLLVLPSGFTISGDGHSNAFEGQSRQVVSKGSLVTLMLQVLASSTPSMDMIDMEFVGSVTTLVSSTVEKIKAALNCSN

SEQ ID NO: 31523 - protein, 173 aa, Glycine max
  Clone ID: TF_GmC3892_1.pep
HGEGGNYSKQIEDTGISDTSDDEDWNDAAAPSRKKKLTGNVTPVSPNANASNNSIHTLKRNAHQNKVENTNSSPTKSLDGRSKSGSRDKRSGSSAHKRLGEAVVQRLHKSFKENQYPDRSTKESLAQELGLTYQQVAKWFDNTRWSFRHSSQMETNSGRNASPEGTEGRAEKG

SEQ ID NO: 31524 - protein, 156 aa, Glycine max
  Clone ID: TF_GmC617300_1.pep
MEGVSEGEKKKEPVEGENKSKRKMKTASQLEVLEKAYAAEAYPSEALRAELSVKLSLSDRQLQMWFCHRRLKDRNAKKLQNDSSLAGAPAVGEEGVEQVTGADVGRDCGLASGPFNHLDSRKIAPRPGMTAFPSMGAGLPAVVGSSYYEPPQNMDV

SEQ ID NO: 31525 - protein, 832 aa, Glycine max
  unsure (1)..(832): unsure at all Xaa locations
  Clone ID: TF_GmC6526_1.pep
MMAVSSACKDGSKVALDNGKYVRYTPEQVEALERLYHECPKPSSLRRQQLIRECPILSNIEPKQIKVWFQNRRCREKQRKEASRLQAVNRKLTAMNKLLMEENDRLQKQVSHLVYENSFFRQQTHNNNATLATTDTNTSCESVVTSGQRNLTPQQHPPRDASPAGLLSIAEETLAEFLSKATGTAVEWVQMPGMKPGPDSIGIVAISHGCPGVAARACGLVGLEPTRVVFSSCNFAVEWMSMQLAPAQNLFLLQSMHLSLMMRPFYLLSTSLLEDGSFVVCERSLNNTQNGPAMPPVQHFVRADMLPSGYLIRPCEGGGSQPWPDNMFVVSXCSVQRVSLALSPSRXVLTMLSTYHLALLRHKHLLDGSVTATGSXSWGRTSKXVKAVNPFSSLFGITQMQFCAALXSMLESDGIDDVTLLVNSSPSKMMGVSLVYNNNGFPSVSSSVLCEFPQIMQQNVPPAILLRFLREHRSEWADSSIDAYSAAAIKAGPCSLPGARSGGFGGRVILPLAHTIEHEEFMEVIKLENMGYYRDDMSIPGDVFLLQLCSGVDEHAVGTSAELVFAPIDASFSDDAPILPSGFRIIPLDSGTDAASPNRTLDLASALEVGTTANKAASDNSAHSGSTKSVMTIAFQFAFEVHLQENIATMARQYVRSIIASVQRVSLALSPSRFGSHNAFHLPPGTPEAQTLARWICNSYRFYLGVELLKCEGSESILKSLWHHSDAVLCCSLKALPVFTFANQAGLDMLETTLVALQDITLEKIFDDNGKKTLCTEFPQIMQQGFMCIQGGICLSSMGRPVSYERAVAWKVLNEEESAHCICFMFINWSFV

SEQ ID NO: 31526 - protein, 183 aa, Glycine max
  Clone ID: TF_GmC69305_1.pep
MELALSLGDTPKPFSLPAKNDSVSFKIALGDDKRVSSDPPVQLDLLPSTPVLPSSRLRIPWLSDALGMERVTSEIPVRAVDDTDDGAALSSPNSAVSSFQMDFCFRNSRKSCEGASDEDDENGSTRKKLRLSKQQSVFLEESFKEHTTLNPKQKLALAKQLNLRPRQVEVWFQNRRARTKLKQ

SEQ ID NO: 31527 - protein, 224 aa, Glycine max
  Clone ID: TF_GmC1889_1.pep
MVPFIVFCVFSMAVLPSSSSSLELTISVPGFASSPTLLPSSSVKELDINQVPLEEDWMASNMEDEEESSNGEPPRKKLRLTKEQSLLLEESFRQNHTLNPKQKESLAMQLKLRPRQVEVWFQNRRARSKLKQTEMECEYLKRWFGSLTEQNRRLQREVEELRAIKVGPPTVISPHSCEPLPASTLSMCPRCERVTSTADKPPSAAATLSAKVPPTQSRQPSAAC

SEQ ID NO: 31528 - protein, 151 aa, Glycine max
  Clone ID: TF_GmC126645_1.pep
MEGNYGSTRRYVPRADSSLSFLYNYNYTPYPGMEVKQQTLAGTSSSMEKVNCGNQEKKKRLTSDQLDSLENSFQKEIKLDPDRKMKLSKELGLQPRQIAVWFQNRRARWKNKQLEHLYDSLKQEFDVISKEKHNLGEEVMKLNTLLREQAF

SEQ ID NO: 31529 - protein, 822 aa, Glycine max
  Clone ID: TF_GmC95_1.pep
MSFGGFLETKQSDGGGGRIVVSDIPYNSNNGSNHSNDIMPSGAISLPRLATPTLAKSMFNSPGLSLALQSDIDGQGDMNRLMPENFEQNGLRRSREEEHESRSGSDNMDGGSGDDFDAADNPPRKKRYHRHTPQQIQELESLFKECPHPDEKQRLELSRRLNLETRQVKFWFQNRRTQMKTQLERHENSLLRQENDKLRAENMSMREAMRNPICSNCGGPAMIGEISLEEQHLRIENARLKDELDRVCALAGKFLGRPISSLTGSIGPPMPNSSLELGVGSNGFGGLSTVPSTMPDFGVGISSPLAMVSPSSTRPTTTALVTPSGFDNRSIERSIVLELALAAMDELVKMAQTGEPLWMRSLEGGREILNNEEYTRTITPCIGLRPNGFVTEASRQTGMVIINSLALVETLMDSNRWSEMFPCMIARTSTTEVISSGINGTRNGALQLMHAELQVLSPLVPVREVNFLRFCKQHAEGLWAVVDVSIDTIRETSGAPTFVNCRRLPSGCVVQDMPNGYSKVTWVEHAEYDESQIHQLFRPLLSSGMGFGAQRWVTTLQRQCECLAILMSSAAPSREHSAISSGGRRSMLKLAHRMTNNFCSGVCASTVHKWNKLNAGNVGEDVRVMTRKSVDDPGEPPGIVLSAATSVWLPVSSQRLFDFLRDERLRSEWDILSNGGPMQEMAHIAKGQDHANCVSLLRASAINANQSSMLILQETCTDASGSLVVYAPVDIPAMHVVMNGGDSAYVALLPSGFAIVPDGSVEENGGASQQRAASGGCLLTVAFQILVNSLPTAKLTVESVETVNNLISCTVQKIKSALHCES

SEQ ID NO: 31530 - protein, 282 aa, Glycine max
  Clone ID: TF_GmC1282_1.pep
KDAPAYELLSEDEDWGPGKRKRREKESDAVDSLMTLHESENRHPNNEHNMTSKDSSSIKIKRHCFRIPRDAVERLRQVFAENELPPRSIREGLSKELGLDTEKVSKWFKNARYLALKNRKHQAEGVADQLQSITSTKNRLQKQENVDPLKSKTPKITRTHSQKDVKNVNGRKKMKSSNKKRQPEIPPPPGENGKKDFMEISDDVSLKKLLKKRKKRLINFTFGGDSQLAELEFERLSELKTKVDSMKQKLTAIQNYRVKGSPYSNEPSIVYVPTAVLREKVE

SEQ ID NO: 31531 - protein, 219 aa, Glycine max
  Clone ID: TF_GmC6828_1.pep
MEAEHHHQTSNAGGIIGGLYVKVMTDDQMELLRQQISVYATICQQLVEMHKAVTIQQDLAGLRLGNLYCDPLMACSGHKITARQRWTPTPLQLQVLERIFDEGNGTPSKQKIKDITIELGQHGQISETNVYNWFQNRRARSKRKQLTPALNVVEPEVETEVEVESPKEKKTRAEGFQVQPYEKSSPHRIKDMYIQSPDIGFDQLMSKIEVAGCYSSYFL

SEQ ID NO: 31532 - protein, 109 aa, Glycine max
  Clone ID: TF_GmC294_2.pep
MEYSQYTTYSAEGVEAETYTSSCTTPSRSKKRNNNNTRRFSDEQIKSLETMFESETRLEPRKKLQLARELGLQPRQVAIWFQNKRARWKSKQLERDYAILQSNYNTFAS

SEQ ID NO: 31533 - protein, 250 aa, Glycine max
  Clone ID: TF_GmC776238_1.pep
MEDNNEECIAGLCLGLGLGLGSGHVPKKNKQKENKAVVCLDLAFELCPKGEKAVNNVNHHHDKVERISLERIHDYPNEKSTDSDNSNNNGCRKKLRLSKDQSSMLENSFKQHSTLNPVLIHALAARLNLKTRQVEVWFQNRRARTKLKQTEVDRELLKKHCQNLSDENKRLKKELQELRATKGWTVATMHSTIQTGDPDNVGFFLRSRVMSCRFCSCPWGVGRRCVCGWFWVPSGRSQDLTRASSTGYNT

SEQ ID NO: 31534 - protein, 243 aa, Glycine max
  Clone ID: TF_GmC722_2.pep
MMEGDENIQASSKGKYVESFNCSEAPRKKSKKIENKRRFSDEQIRSLECIFESESKLEPRKKMQLARDLGLQPRQVAIWFQNRRARWKSKRIEQEYRKLKDEYDNLASRFESLKKEKDSLQLEKLSDLLEACQDDGREDKAGKENSIEDGGSGSGYSSWKPEAKPRFSNEGLEERIGVYSDDQNENSIIRGGEKSEDKGHQLLRMDDHAEMPLASLEKWYSGVDPSGILDQSCSSSQWLDFWT

SEQ ID NO: 31535 - protein, 201 aa, Glycine max
  Clone ID: TF_GmC4674_2.pep
EDGAATRKKLRLKRERDLSCEEVVDAKEIDQRDLSCEGIIRATEEEEDGAATRKKLRLTKEQSALLEESFKQHSTLNPKQKQALSKQLNLRPRQVEVWFQNRRARTKLKQTEVDCEFLKKCCETLTDENRRLQKELQELKALKLAQPLYMPMPAATLAMCPSCERLGGSAVNGAGGSPKTSFSMAPKPHFFNPFANPSAAC

SEQ ID NO: 31536 - protein, 207 aa, Glycine max
  Clone ID: TF_LIB4280-016-R1-K1-E12.pep
MSFGGFLDDKSGSGGARINNFSDIPYNNNNVTNTTTTNNNNNDRMPFGAISQPRLVTTTPTLAKSMFNSPGLSLALQTSIDGQEDVNRMAENSFEPNGLRRSREDEHESRSGSDNMDGGSGDEHDAADNPPRKKRYHRHTPQQIQELEALFKECPHPDEKQRLELSRRLCLETRQVKFWFQNRRTQMKTQLERHENTLLRQEKRQLR

SEQ ID NO: 31537 - protein, 853 aa, Glycine max
  unsure (1)..(853): unsure at all Xaa locations
  Clone ID: TF_GmC13446_1.pep
MALSMHKDSANNQMDSSKYVRYTPEQVEALERVYAECPKPSSLRRQQLIRECPILSNIEPKQIKVWFQNRRCREKQRKEASRLQTVNRKLTAMNKLLMEENDRLQKQVSHLVYENGYMKQQIHTASAGTTTDNSCESVEMSGHNQQQRXPTPKDPNREANNPAGLFVCFSLLAIAEETLAEFLSKATGTAVDWVQMIGMKPGPDSIGIVAVSRNCSGVAARACGLVSLEPTKVAEILKDRQSWYRDCRCVDVLSIVPTGNGGTIELLYMQTYAPTTLAAARDFWTLRYTTSLEDGSLVICERSLTSSTGGPTGPPSTTFVRAEMLPSGFLVRSCEGGGSIIHIVDHIDLDVWSVPEVLRPLYESSKFLAQKLTTAALQHIRQIAQESSGEVHYGGGRQPAVLRTFSQRLCKGFNDAVNGFVDDGWSLMGNDGVEDVTIAINSSPNKFLGSNYNASMFPAFGGGVLCAKASMLLQNVPPALLVRFLREHRSEWADYGVDAYSAACLKASPYAVPCARPGGFPSTQVILPLAHTIEHEEFLEVVRIEGHAFSPEDVAMARDMYLLQLCSGVDESAVGACAQLVFAPIDESFADDALLLPSGFRVIPLDPKSDGPAPTRTLDLASTMEVGSGNARPAGEADLNGYNLRSVLTIAFQFTFENHTRDNVAAMARQYVRSVVGSVQRVAMAIAPSRLNTQLAPKSLPGSPEALTLARWIFRSYRVHTGTELFKAESTAGDAIFKQLWHHPDAIICCSVKTNASPVFTFSNQAGLDMLETTLVSLQDIMLDKVLDESGRKILCSEFSKIMQQGFASLPAGICVSSMNRPVSYEQVVAWKVLNDDDSNHCLAFMFINWSFV

SEQ ID NO: 31538 - protein, 213 aa, Glycine max
  unsure (1)..(213): unsure at all Xaa locations
  Clone ID: TF_GmC13446_2.pep
MALSMHKDSANNQMDSSKYVRYTPEQVEALERVYAECPKPSSLRRQQLIRECPILSNIEPKQIKVWFQNRRCREKQRKEASRLQTVNRKLTAMNKLLMEENDRLQKQVSHLVYENGYMKQQIHTASAGTTTDNSCESVVMSGQNQQQNPTPQHPNRDANNPAGLLXIAEETLXSSTGTAVDWVQMIGMKPGPDSSYPHVAWQRACSLSLEPST

SEQ ID NO: 31539 - protein, 329 aa, Glycine max
  Clone ID: TF_GmC221_1.pep
MAASGSSFSNITSFLRNQQPSSQPLDSSLFLSAPSIFVSGSRSMVSFEAEGGKGCNGSFFRAFDMDDNGDECMDEYFHKPEKKRRLSMNQVQFLEKSFEEENKLEPERKTKLAKDLGLRPRQVAIWFQNRRARWKTKTLEKDYEALHASFENLKSNYDSLLKEKDNLKAEVASLNEKVLARGKQEGHMKQQAESEEETKRLLHLQEQEPPQRLLLESVSEGEGSKVSSVVGGCKQEDISSARSDILDSDSPHYTDGVNSALLEHGDSSYVFEHDQSDMSQDEEDNLSKSLYPSYLFPKLEEDVDYSDPPESSCNFGFSEEDHALWTWAY

SEQ ID NO: 31540 - protein, 278 aa, Glycine max
  Clone ID: TF_701009968_FLI.pep
MLEGLDEEGCVEEAGHHSEKKRRLNVDQVKALEKNFEVENKLEPDRKVKLAQELGLQPRQVAVWFQNRRARWKTKQLERDYGVLKANYGSLKLNFDTLQQDNEALLKQIKELKSRLVQEENNNNTESDVSVKEEMIATLQDSNPLCESAIPGSDSKELSYECFNKSDEVGGGSVFPVDFKDGSSDSDSSAILNEENNNHSPNNNAAISSCGVLQSHGLLSSPSSSSMNNCFQFQKQYQTTTQYVKMEEHNFLSADEACNFFSDEQAPTLQWYCSEEWS

SEQ ID NO: 31541 - protein, 846 aa, Glycine max
  Clone ID: TF_GmC556_1.pep
RFDLDVESMSCKDGSRNGIGMDNGKYVRYTPEQVEALERLYHDCPKPSSIRRQQLIRECPILSNIEPKQIKVWFQNRRCREKQRKESSRLQAVNRKLTAMNKLLMEENDRLQKQVSQLVYENGYFRQHTQITTQATKDTNCESVVTSGQQHNLITQHPPRDASPAGLLSIAEETLAEFLSKATGTAVEWVQMPGMKPGPDSIGIVAISHGCTGVAARACGLVGLEPTRVAEILKDRPLWFRDCRAVDVLNVLPTANGGTIELLYMQLYAPTTLAPARDFWLLRYTSVLEDGSLVICERSLKNTQNGPSMPPVQHFVRAEMLPSGYLIRPCEGGGSIIHIVDHMDLEPWSVPEVLRPLYESSTVLAQKTTMAALRHLRQISHEVSQSNVTGWGRRPAALRALSQRLSRGFNEALNGFTDEGWTTIGNDGVDDVTILVNSSPDKLMGLNLSFANGFPSVSNAVLCAKASMLLQNVPPAILLRFLREHRSEWADNNMDAYTAAAIKVGPCSLSGSRVGNYGGQVILPLAHTIEHEEFLEVIKLEGIAHSPEDTIMPREMFLLQLCSGMDENAVGTCAELISAPIDASFADDAPLLPSGFRIIPLESGKEASSPNRTLDLASALDVGPSGNRASNGCANSSCMRSVMTIAFEFAFESHMQEHVASMARQYVRSIISSVQRVALALSPSHLSSHAGLRSPLGTPEAQTLAHWICNSYRCYLGVELLKSNNEGNESLLKSLWHHSDAILCCTLKALPVFTFSNQAGLDMLETTLVALQDITLEKIFDDHGRKILFSEFPQIIQQGFACLQGGICLSSMGRPVSYERVVAWKVLNEEENAHCICFMFMNWSFV

SEQ ID NO: 31542 - protein, 95 aa, Glycine max
  Clone ID: TF_GmC556_10.pep
SMSCKDGSRNGIGMDNGKYVRYTPEQVEALERLYHDCPKPSSIRRQQLIRECPILSNIEPKQIKVWFQNRRCREKQRKESSRLQAVNRKLTAMNK

SEQ ID NO: 31543 - protein, 241 aa, Glycine max
  Clone ID: TF_GmC556_9.pep
MSCKDGSRNGIGMDNGKYVRYTPEQVEALERLYHDCPKPSSIRRQQLIRECPILSNIEPKQIKVWFQNRRCREKQRKEVVTAARRRQKGGIVAISHSCTGVAARACGLVGLEPTRVAEILKDRPLWFQDCRAVDVLNVLPTANGGTIELLYMQLYAPTTLAPARDFWLLRYTSVLEDGSLVICERSLKNTQNGPSMPPVQHFVRAEMLPSGYLIRPCEGGGSIIHIVDHMNLEPWSVPEVL

SEQ ID NO: 31544 - protein, 299 aa, Glycine max
  Clone ID: TF_GmC5011_1.pep
MMVQKEDLGLSLSLNFPHHNTPNPQHPSLMSSSTHSSSPSGCNPQKPSWNEAFTSSDRNSDTCRGETRSFLRGIDVNRLPSAVDTEEETGVSSPNSTVSSVSGKRSEREEPNGEEHDMDRACSRGISDEEDAETARKKLRLSKDQSAILEESFKEHNTLNPKQKLALAKQLGLRPRQVEVWFQNRRARTKLKQTEVDCEVLKRCCENLTEENRRLQKEVQELRALKLSPQFYMQMTPPTTLTMCPSCERVAVPSSAVDAATRHHPMAQAQAQAQIRHRPIGPWASASPITHRPFDVFHH

SEQ ID NO: 31545 - protein, 238 aa, Glycine max
  Clone ID: TF_GmC294_1.pep
MEYTYSAGVEAETHTSSSTTPSRSKKRNNNTRRFSDEQIKSLETMFESESRLEPRKKLQLARELGLQPRQVAIWFQNKRARWKSKQLERDYGILQSNYNSLASRFEALKKENQTLLIQLQKLNHLMQKPMEPGQRCTQVEAANSMDSESENGGTMKCEAEGKPSPSMEISEHLLGVLSDDDTSIKVEDFGLEDEHGLLNFAKHVDGSLTSPEDWNAFESNDLLGQSTTDDYQWWDFWS

SEQ ID NO: 31546 - protein, 218 aa, Glycine max
  Clone ID: TF_GmC1605_1.pep
MDWHHGTKPLVPRPETLSFFYNYNYNSPYPGVEVKQAALMETGEGSVPALMDSRNKEKKKRLTNNQIELLERSFQEEIKLDPERKMKLSRELGLQPRQIAVWFQNRRTRWKTKQLEHLYDVLKHQYDVVSNEKQKLQEEVMKLKAMLSKEQGFGKQTFGCYTEISGEETVESTSEGLTLRGKSNIEHVADQGYCSFTVEDYNTTVLLPPHCHWPAVPY

SEQ ID NO: 31547 - protein, 291 aa, Glycine max
  Clone ID: TF_GmC6963_1.pep
MGEKDDDFGLSLSLSLGRVNQQQQHPPPLNHMHQPQQLQPVPMNHNKTLFGDLSQLPDRSSEMIRGIDVNSAAECDGVSSPNSAVSSVSGGDGKQSERDDDNNAAAVAGERTSCSRGSDDDDGGGSDASRKKLRLTKEQSMVLEETFKEHSTLNPKRKQALAEELNLKPRQVEVWFQNRRARTKLKQTEVDCEYLKRCYENLTEENRRLHKEVQELRALKLSPQMYMHMNPPTTLTICPSCERTHSFASSSTATIHSAVAATSSNRKLFGTNIRLPVSFNTRPFEGPIPRP

SEQ ID NO: 31548 - protein, 240 aa, Glycine max
  Clone ID: TF_GmC53_4.pep
LAFFSSIYAFFYYYCRKVGAPPELASLLEEIARESYPTDALREIGDDPELDEFMESYCEVLHRYKQELSKPFNEATLFLCSIESQLSNLCKGTLTMPLDNNHSDEAAGTSEDELSWEKVEAVEGHESSGPRPGDQELKEMLLRKYGGYLSSLKKEFLKKRKKGKLPKDARMVLMDWWNTHYRWPYPTEEEKVQLSEMTGLDQKQINNWFINQRKRHWKPSEDMRFAIMDGVSGSGFGGPI

SEQ ID NO: 31549 - protein, 202 aa, Glycine max
  unsure (1)..(202): unsure at all Xaa locations
  Clone ID: TF_GmC189414_1.pep
KHTKHSYTSEVWFWEARMYGDCQVMSSMGGNVVVNPDTLFSSSIQNSSFNXIPTMPFQPFPSMKEEDGILRGKEEIESGSGSEQLVEDKSGNEQESHEQPTKKKRYHRHTARQIQEMEALFKECPHPDDKQRLKLSHELGLKPRQVKFWFQNRRTQMKAQQDRADNVILRAENESLKSENYXLQAALRNVICPNCVAMHNGC

SEQ ID NO: 31550 - protein, 343 aa, Glycine max
  Clone ID: TF_GmC1705_2.pep
NSSTLIGSTFSLSKLSHLSALPFNLFTSDTLLILLPVPLSGSKSVVDFENVNGSRVTDRPFFQALEKEENCDEDYEGCFHQPVKKRRLTSEQVQFLERNFEAHDKLEPERKVQLAKELGLQPRQVAIWFQNRRARFKTKQLEKDYGVLKASYDRLKSDYESLVQENDKLKAEVNSLESKLILRDKEKEENSDDKSSPDDAVNSSPHNNKEPIMDLLISKNATTSENGTEVSTLPLPIMVTCKQEDANSAKSDVLDSDSPHCTDYGNHPSSFVEPADSSHAFEPEDHSEDFSQDEEDNLSENFLTLPSSCCLPKVEEPCYDDPPENSCNFGFHVEDQTFCFWPY

SEQ ID NO: 31551 - protein, 229 aa, Glycine max
  Clone ID: TF_GmC4807_1.pep
RASERARNVTYHTTLNHRPPFQDHMMLMSQLFPADAYTQIISQQGETNKKPRRRRNKQHREDERRGSLVMKKWKLSEVQVNLLEQNFGNERKLESERKDRLAMELGLDPRQVAVWFQNRRARWKNKKLEEEYSSLKKNHEATLLEKCCLESEVLKLKEQLSEAEKEIQRLLESAERVPSNSSSSSQSQSMEAVDPPFFGEFGVDGYEDDVFYVPETHYINGMEWINLYM

SEQ ID NO: 31552 - protein, 150 aa, Glycine max
  unsure (1)..(150): unsure at all Xaa locations
  Clone ID: TF_GmC1455_1.pep
SPDSTNSNNGSRKKLKLTKEQSATLEDIFKLHSSLNPAQKQALAEQLNYXHRRVEVWFQNRRARTKLKQTEVDCEFLKKCCEKLTDENLRLKKELQELRAQKLGSTPLYIQLSKATTLTICSSCEKLLKPNEGNKGAINKLQNSIELGGI

SEQ ID NO: 31553 - protein, 466 aa, Glycine max
  unsure (1)..(466): unsure at all Xaa locations
  Clone ID: TF_GmC1443_1.pep
MEGEACSEGENNLKRGGSDDDSNENNNNNNNGSSGKIVNSNEGQSKPKRQMKTPFQLETLEKAYAVDNYPSETMRVELSEKLGLSDRQLQMWFCHRRLKDKKDLPSKKPPRKVLAEPLPDSPRDDPRLSLELANEYGSGSGSGSSPYARVEPLNVVPRCVPGYYESPQAKLELRAIACVEAQLGEPLRDDGPILGLEFDPLPPXCFGAPIAAVTEQQKLPSFAYDSKIYERHDARTNKALARTFRDNQFLPNKSGIRSDASGQFSQSHLHDPIEGFVRNPPFAHGNEHLPRIHATKGHSSRVRLLSQQDKQLIPYQSPSRDDDAAPQRELYPNIANAGKNSHSTGHQIVGPENLHALPSVQVLHNNATWIEKKRKSDDAHDVEAHEMKIRKELEKQDNLRRKSEERTRKEMERQDRERKKEEERLMRERQREEERARREQKREMERREKFLLKENLQAEKTRQREK

SEQ ID NO: 31554 - protein, 102 aa, Glycine max
  Clone ID: TF_LIB3242-123-Q1-J1-B9.pep
METGERSVPAMDRGNKEKKKRLTNNQIELLERSFQEEIKLDPERKMKLSRELGLQPRQIAVWFQNRRTRWKAKQLEHLYDMLKHQYDVVSNEKQKLQEKLLS

SEQ ID NO: 31555 - protein, 201 aa, Glycine max
  unsure (1)..(201): unsure at all Xaa locations
  Clone ID: TF_GmC1517_1.pep
MGDFIFSFKTQPQDHAHHQRAKHNNNNNKRLTEDQVAILEKCFASNMKLEPEQKFHLANQLGVPPRQVAIWYQNKRARWKTQSLEVDHGVLQARLENVVAEKKQLEKDVERLKAELKKAQEMLLITNNVKSXTNNNNNASCEFSTSFEEGGSSGVVLDDATHHHHHECWQSGGEVMQVEELYAYFVGANYGTGLHEKGHKI

SEQ ID NO: 31556 - protein, 287 aa, Glycine max
  unsure (1)..(287): unsure at all Xaa locations
  Clone ID: TF_GmC357_3.pep
HASAVQKEDLGLSLSLSFPLLSSSPSSHNPQKPSWNDPIFTSSGEAGSFLRGIDVNRLPSVVDCEEEAGVSSPNSTVSSVSGKRSERETNGEENDTDRACSRGIISDEEDAETSRKKLRLSKDQSIVLEESFKEHNTLNPKQKLALAKQLGLRARQVEVWFQNRRARTKLKQTEVDCEFLKRCCENLTEENRRLQKEVQELRALKLSPQFYMHMTPPTTLTMCPSCERVXVPPSSAVDPATRHHHVPPSHPRAFPIGXHGQALRCPPSQILDSRKQNDKIEKKDRKP

SEQ ID NO: 31557 - protein, 312 aa, Glycine max
  Clone ID: TF_GmC4674_1.pep
MMGLDQDASSNSGLHLILGLALTATTTTTPSLPSISNKLDHVDHHHHLITLRPTTKSPYNSSEAEPSLTLGLSRESYLKVPKNIIGQNSNNKVSSCDDPLDHLSTQTNSPHHSAVSSFSSGRVKRERDLSCEEVVDATEIDQRDHSCEGIVRATDEDEDGTAARKKLRLSKEQSALLEESFKQHSTLNPKQKQALAKQLNLRPRQVEVWFQNRRARTKLKQTEVDCEFLKKCCETLTDENRRLQKELQELKALKLAQPLYMPMPAATLTMCPSCERLGGGINGGGGGSPKTPFSMAPKPHFFNPFANPSAAC

SEQ ID NO: 31558 - protein, 192 aa, Glycine max
  Clone ID: TF_uC-gmflLIB3275P163e04b1.pep
MFQPNLMDALEMGQNTSESEVPRILEDEFDSATKSGSENHEGASGEDQDPRPNKKKRYHRHTQHQIQEMEAFFKECPHPDDKQRKELSRELGLEPLQVKFWFQNKRTQMKTQHERHENTNLRTENEKLRADNMRYREALSNASCPNCGGPTAIGEMSFDEHHLRLENARLREEIDRISAIAAKYVGEARGEL

SEQ ID NO: 31559 - protein, 842 aa, Glycine max
  Clone ID: TF_GmC571_1.pep
MAMVVAQHRESSSSGSIDKHLDSGKYVRYTAEQVEALERVYAECPKPSSLRRQQLIRECPILSNIEPKQIKVWFQNRRCREKQRKEASRLQTVNRKLTAMNKLLMEENDRLQKQVSQLVCENGFMRQQLHTPSATTTDASCDSVVTTPQHTLRDASNPAGLLSIAEETLTEFLSKATGTAVDWVQMPGMKPGPDSVGIFAISQSCSGVAARACGLVSLEPTKIAEILKDRPSWFRDCRSLEVFTMFPAGNGGTIELVYTQTYAPTTLAPARDFWTLRYTTSLENGSLVVCERSLSGSGTGPNPAAAAQFVRAETLPSGYLIRPCEGGGSIIHIVDHLNLEAWSVPEVLRPLYESSKVVAQKMTIAALRYIRQIAQETSGEVVYGLGRQPAVLRTFSQRLSRGFNDAVNGFNDDGWTVLNCDGAEDVIIAVNSTKNLSGTSNPASSLTFLGGILCAKASMLLQNVPPAVLVRFLREHRSEWADFNVDAYSAASLKAGTYAYPGMRPTRFTGSQIIMPLGHTIEHEEMLEVIRLEGHSLAQEDAFVSRDIHLLQICSGIDENAVGACSELVFAPIDEMFPDDAPLVPSGFRIIPLDSKPGDKKDAVATNRTLDLTSGFEVGPATTAGADASSSQNTRSVLTIAFQFPFDSSLQDNVAVMARQYVRSVISSVQRVAMAISPSGINPSIGAKLSPGSPEAVTLAHWICQSYSYYLGSDLLRSDSLVGDMMLKQLWHHQDAILCCSLKSLPVFIFANQAGLDMLETTLVALQDITLDKIFDEAGRKALCTDFAKLMEQGFAYLPAGICMSTMGRHVSYDQAIAWKVLTGEDNTVHCLAFSFINWSFV

SEQ ID NO: 31560 - protein, 61 aa, Glycine max
  Clone ID: TF_GmC114_3.pep
MLQQRSVPAPFLTKTYQLVEDPGTDEVISWGESGNTFVVWKHADFAKDLLPKYFKHNNFSS

SEQ ID NO: 31561 - protein, 120 aa, Glycine max
  unsure (1)..(120): unsure at all Xaa locations
  Clone ID: TF_LIB3242-385-Q1-J1-H5.pep
MVKSNENGAVYAYVPTDLKTCYELVGERATDSIIPWSDGGDMVTLLRXTHLYDTLLPTYCRHNSFSSFVRQLSIYGSRRIESDCYXLARENIVRCQKHMMKTIRRKTHSHNTDQQKALPL

SEQ ID NO: 31562 - protein, 179 aa, Glycine max
  Clone ID: TF_uC-gmflLIB3275P163e11b1.pep
IKGFRKVVPDRWEFANDCFRRGERALLRDIQRRKLLPVPPAAAAPAAVTANTVTVAVAAPAVRTVSPTTSGDEQVLSSNSSPIAGNNNNNTVHRTTSCTTAPELLEENERLRKENIQLSNELSQLKGLCNNILSLMTNYASGFSRQQLESSTSAVRTVPGPDGKAPVELLPAKHVSSAD

SEQ ID NO: 31563 - protein, 53 aa, Glycine max
  Clone ID: TF_GmC1369_2.pep
PHAFSRDLLPRYFKHNNFSSFVRQLNTYVAAVAWTRIYGSDSNRYLLKIIQKP

SEQ ID NO: 31564 - protein, 278 aa, Glycine max
  unsure (1)..(278): unsure at all Xaa locations
  Clone ID: TF_GmC1369_1.pep
GFRKIDPDRWEFANEGFLRGHRHLLANIRRRKQPSSQPSSSSSSSSYYYYSSSSQQAQQGHCVEVGRFGLDEEIDRLRRDKHVLMMELVKLRQQQQNXRSYLQAMEERLRGTEIKQQQMMAFLARALKNPTFIQQLLQQKEKRKELEEAMSKKRRRPIERGPNHGVVGEESSSVKVESLVFGDEYGFGVSELEVLAMEMQGYGKGRREQEEEPDEALDQSQERLEKELDEGFWEELFSEGFEGELDTNPTNSQDQDEEEEDHVNVLANRFGYLGSSPK

SEQ ID NO: 31565 - protein, 490 aa, Glycine max
  Clone ID: TF_GmC1855_1.pep
MDGGGSTPAAPIPNANAPPPFLSKTYDMVEDPSTDAIVSWSATNNSFIVWDPPQFARDLLPKYFKHNNFSSFVRQLNTYGFRKVDPDRWEFANEGFLKGQKHLLRSITRRKPAHGQNHQQPQQPHGQSSSVGACVEVGKFGLEEEVERLKRDKNVLMQELVRLRQQQQTTDNQLQTMVQRLQGMEQRQQQMMSFLAKAVQSPGFFAQFVQQQNDSNRRITEVNKKRRLKQEGMAETEHAATPDGQIIKYQPMVNEAAKAMLRQIMKWDTSCVESLNKNSDNYVIGDASSSSSGMDSSSSSGWTSGVTLKEVSPASVQSSHVPAATGTQGHVPSTVKPEILSVPQAVASEKVMKDGAHDPPSIPVSQADVMIPDLPPITEMVTGNILDIPEENYMATETDEGYMDSSLGAGGSFPIDFEGISPDADIDDLLANPIWDEILQTSVPEDIDTNVAEASKGNEVQPMENGWGKTQHMDHLTEQMGLLSSDAKRV

SEQ ID NO: 31566 - protein, 154 aa, Glycine max
  unsure (1)..(154): unsure at all Xaa locations
  Clone ID: TF_jC-gmXLIB3563P087Cb01a1.pep
MVPAPFLTNTYDVLERSQXTDQAIXSCGESDNTFLXAWKHADFAXDWLAKYFXHNILSYYGRQRKSLYXFLDIVPDKWEFSNEHFWRGLNDLLSEIKRQMTEPDSCXHPTEAXKSGEGCIYHVNSGSDDXGSTLTWSSFSGSMIQGSEETLTTA

SEQ ID NO: 31567 - protein, 151 aa, Glycine max
  Clone ID: TF_uC-gmropic020d07b1.pep
GCVGGNNSPSPKPLEMVNPVPPILSKTFDLVDAPTLDPIISWNSTGLSFVVWDPLEFARIVLPRHFKYNNFSSFVRQLNTYGFRKIDTDKWEFFNEAFQRGKKHLLKNIQRRRSSQSQPVGSYIGIGSSTEAGGSEVEIEIERLRKEKTML

SEQ ID NO: 31568 - protein, 404 aa, Glycine max
  Clone ID: TF_GmC2149_1.pep
MGGEEVARVKAELFDDNESDRNDDDVLSESKDSGVTTAHAVKEEMDDGAANWSSSSSTSPKPMEGLHEVGPPPFLKKTFEMVEDPHTNPIVSWSQTRHSFVVWDSHEFSKTLLPKYFKHSNFSSFVRQLNTYGFRKVDSDRWEFANEGFQGGKKHLLKNIRRRSKCNKLHQGAFNMMKPDVDSEVEKLKKDQNILKVEILKLRQQQENSHVQLTNVQERIRCAEMKQFQMMYFLTRMARRPAFVEQLVHKIRRKREIDGNDMVKRPRLMGNPCHVPFPKTMETTPNFDYRHQQGHKQFATLQSELNVTEVNSSRMEHPTPSPLEDELGNSLQGLRAHGCSRARAQDASSSAYHVMSEKLMRENSIVDEELDVNDSNIYLELEDLITKPTDWSVGSASGLVEQTS

SEQ ID NO: 31569 - protein, 362 aa, Glycine max
  Clone ID: TF_GmC1045_1.pep
PAKIPIDLRLLFHGSTAAGGTQRRLRHYRLSIRLRAAESQRSIPTPFLTKTFQLVDDQSIDDVISWNDDGSTFIVWNPTVFARDLLPKYFKHNNFSSFVRQLNTYGFRKVVPDRWEFSNDYFRRGEKRLLCEIQRRKISSPAPSPTAPTTVTVPMPLTAIPIISPSNSGEEQVISSNSSPLRAPAELLDENERLRKENVQLTKELAEMRSLCNNIYSLMSSYGNKNGNSNGSYQTDGGAGGAQGSRESGMTAVKPLDLMPVKRSSGEDAADTVPKEINLIPNPKLFGVAIGAKRAREGGGGSGSGRDCGGGGGGGEEDTLLRLHHVGSADVKSEPLDCQNHRENQETPWLSPCHRTNQRVCN

SEQ ID NO: 31570 - protein, 454 aa, Glycine max
  Clone ID: TF_GmC688_2.pep
MNPNDANSPKPLEILQMNPVPPFLSKTFDLVDDPTLDPIISWGSTGFSFVVWDPLEFARIVLPRHFKHNNFSSFVRQLNTYGFRKIDTDKWEFFNEAFQRGKKHLLKNIQRRRSSQSQQVGSYIGIECSTEAGRSDVEIEIERLRKERTMLMEEVVDLKQEQRRMAHRAGEVNQRLQSTEQRQKQMVSFLVKLIQNPAFLARLRHEEQKEIDSPRVVRKFVKQHQHETGTAETLQEGQIVRYQHDWRNIGMSSETPKLSPVSIEQSPHYLSQGLAGEVSVGAEDLTAQIENIVSNDLAAVHGITVSQEIMIGEGLSSFGAEDPLFKGKSVMSPILEVPPEYFASFPEGLTKGKDFQDFSALGTEGMIKLEDIWDSGLNVSGAASGSGNELWSNHVNYEEFPEFGVTSGMSDSDIWDIGLGSLGIDKWPTDEPSLGETNGQAGQPKEDRPKNFGP

SEQ ID NO: 31571 - protein, 112 aa, Glycine max
  unsure (1)..(112): unsure at all Xaa locations
  Clone ID: TF_jC-gmro02910062b09a1.pep
ELKSGKGFRKVDPDRWEFANEGFLRGEKQLLKSISRRKSAHVNGSQQPSQVHKSAVRACVEVGKFGFEEEVERLKRDKNVLMXELXRLRQKQQGTDNHLKMLATCAVNEQRQ

SEQ ID NO: 31572 - protein, 93 aa, Glycine max
  Clone ID: TF_GmC12036_2.pep
MDGAPQSAGAGGPAPFLLKTYDMVDDASTNDIVSWSSTNNSFVVWNPPEFARLLLPTYFKHNNFSSFIRQLNTYVSFSIPLFRLRIHGALPSF

SEQ ID NO: 31573 - protein, 326 aa, Glycine max
  Clone ID: TF_GmC5651_2.pep
ARAESARGEDDTTFVVWRPPEFARDLLPNYFKHNNFSSFVRQLNTYGFRKIVPDRWEFANEFFKKGEKHLLCEIHRRKTAQPQQGIMNHHHHHAHSPLGVNVNVPTFFPFSSRVSISTSNDSDDQSNWCDSPPRGATSLVNGAAAANYNTSVTALSEDNERLRRSNNMLMSELAHMKKLYNDIIYFVQNHVKPVAPSNSYSSSLLLCNTPSATPISSANNVSMMQRPMNQLLGYYSTNPKQGATQITQPQTYVVNSPTNTSRSSITIFEGPASSNINSCKTKLFGVSLQSKKRVHPDCGSNPETNRARLVLEKDDLGLNLMPPSTC

SEQ ID NO: 31574 - protein, 392 aa, Glycine max
  Clone ID: TF_GmC790_1.pep
MMEEAQGSSSSLPPFLTKIYEMVDDPSTNSIVSWSATNRSFIVWNPPEFSRDLLPKYFKHNNFSSFIRQLNTYGFRKIDPEQWEFANDDFVRGQPHLLKNIHRRKPVHSHSLQNIQGQGVSSLTESERQSFKDEIEKLKHEKEQLLRELEMHEQEWKMYEVQLQHSNDRLEKLEKKQENLVSSVSQVLQKPGIALNLLLLTENMDRKRRLPRSGLFSDDASIEDHMETSQVLPRENADGASIFSSSTERLDLLESSMTFWENITHDVGDVFVQSHLNLDFDESTSCADSPAISCVQLEVEDQPKSHGINVNSEPAVVAAPDLDASKEQPVETAPLTTGVNDIFWERFLTENPGSSEMQEAQSEREDSDGRSNAKFWWNIRNVNNPPEQMGHS

SEQ ID NO: 31575 - protein, 460 aa, Glycine max
  Clone ID: TF_GmC688_3.pep
MNPNDGNNSPSPKPLEMVNPVPPFLSKTFDLVDAPTLDPIISWNSTGLSFVVWDPLEFARIVLPRHFKHNNFSSFVRQLNTYGFRKIDTDKWEFFNEAFQRGKKHLLKNIQRRRSSQSQPVGSYIGIGSSTEAGGSEVEIEIERLRKEKTMLMEEVVDLQQEQRRTAHHAGEVNLRLQSAEQRQKQMVSFLAKLIQNPAFLARLRHKKEQKEIDSPRVVRKFVKQHHETGTTTTAETLQEGQIVRYQPDWRNIAMSSETPKLSSVSIEQSPHYLSQGLAGEMSVVGAEDLTAQIDNIVSDDLAAVHRITPSQEMMIGEGSSTFGAEDPLFKGKSVMSPILEVPPEYFPSFPEGLTKEKKDFQDFSALGTEGMIKLEDIWDSGLNVSGAALSSGNELWGNHVNYEEFPQFGVTSGMSDSDIWDIGLGSFGIDTWPTDEPSLGETDGQSGQPNEDRSKNFDP

SEQ ID NO: 31576 - protein, 328 aa, Glycine max
  Clone ID: TF_GmC1242_1.pep
MLSSHSPPPPPPSFSTTTSTTTTTFTSSPCPRRIYLNNPTQIPKPYPYTHLFTHHSSLLNNYFTNMNPSCRFSSTKHTPFLHNSKPTSPFFLRHSHSHSHQVKPFPLSPPITTTTAKPYPLNILRLRNIKLSHPLATLSSFAEGEEENQKEGAESPPNNDELGGIAKAFNISSRTASAISICMALAVLTFPLFMTSLGQGMALKTKVLSYATLLFGFYMAWNIGANDVANAMGTSVGSGALTLRQAVLTAAVLEFSGALMMGTHVTSTMQKGILVANVFNGKDSLLFAGLLSSLAAAGTWLQFASYYGWPVSTTHCIVGAMVGFGLAY

SEQ ID NO: 31577 - protein, 338 aa, Glycine max
  Clone ID: TF_GmC1045_2.pep
MAKLPVEYNGDCATTASASASAAAESQRSIPTPFLTKTFQLVDDQSIDDVISWNDDGSTFIVWNPTVFARGLLPKYFKHNNFSSFVRQLNTYGFRKVVPDRWEFSNEYFRRGEKRLLCEIQRRKISSPASSPTAPATVSVTAPMPLTAIPIISPSNSGEEQVTSSNSSPAELLDENERLRKENVQLTKELAEMRSLCNNIYSLMSNYANANGKGNSNGSYKTKGGAGVAHGSLESGMTAVKLLDLMPVMRSSDEDAAEMAPEEMNPKLFGVAIGAKRAREGGGGGDCGGGGEEDTLLRLHHAGSADVKSEPLDFQNHRENQKTPWLSPCYRTNQRVCN

SEQ ID NO: 31578 - protein, 192 aa, Glycine max
  Clone ID: TF_GmC8373_1.pep
MYMERIRVKEEEAVTCGGGSSSSSSSSSSFSPQPMEGLHEVGPPPFLSKIFDMVEDSSTDSIVSWSMARNSFVVWDSHKFSADILPRYFKHGNFSSFIRQLNAYGFRKVDPDRWEFANEGFLAGQRHLLKTIKRRRNVSQSLQQKGGSGACVEVGEFGLEGELERLKRDRNILMAEIVRLRHQQLNSREQLN

SEQ ID NO: 31579 - protein, 358 aa, Glycine max
  unsure (1)..(358): unsure at all Xaa locations
  Clone ID: TF_GmC1242_2.pep
MAPLPAEQTGESAPTELQRSIPTPFLTKTYQLVDDPSADDLISWNEDGTSFIVWRPAEFARDLLPKYFKHNNFSSFVRHLNTYGFRKVVPDRWEFANDCFRRGERALLRDIQRRKLLPVPPAAAAPAAVTANTVTVAVAAPAVRTVSPTTSGDEQVLSSNSSPIAGNNNNNTVHRTTSCTTAPELLEENERLRKENIQLSNELSQLKGLCNNILSLMTNYASGFSRQQLESSTSAVRTVPVPDGKAPLELLPAKXSHVSSADEAGHVGGAAPCATANAGEAEVPKLFGVSIGLKRCRTECEGEAEGEDQNQMQTRAQAQTQTQSSQEPDHGSDVKSEPLDGDDSDDQDHDPRWLELGK

SEQ ID NO: 31580 - protein, 464 aa, Glycine max
  unsure (1)..(464): unsure at all Xaa locations
  Clone ID: TF_GmC688_1.pep
MNPNDANSPKPLEILQMNPVPPFLSKTFDLVDDPTLDPIISWGSTGFSFVVWDPLEFARIVLPRHFKHNNFSSFVRQLNTYSHGAPPGFRKIDTDKWEFFNEAFQRGKKHLLKNIQRRRSSQSQQVGSYIGIECSTEAGRSDVEIEIERLRKERTMLMEEVVDLKQEQRRMAHRAGEVNQRLQSTEQRQKQMVSFLVKLIQNPAFLARLRHEEQKEIDSPRVVRKFVKQHQHETGXNNTAETLQEGQIVRYQPDWRNIAMSSETPKLSSVSIEQSPHYLSQGLAGEMSVVGAEDLTAQIDNIVSDDLAAVHGITPSQEMMIGEGSSTFGAEDPLFKGKSVMSPILEVPPEYFASFPEGLTKGKDFQDFSALGTEGMIKLEDIWDSGLNVSGAALSSGNELWGNHVNYEEFPQFGVTSGMSDSDIWDIGLGSFGIDTWPTDEPSLGETDGQSGQPNEDRSKNFDP

SEQ ID NO: 31581 - protein, 93 aa, Glycine max
  Clone ID: TF_GmC92665_2.pep
MEGTSNKGLLECGRKCTPPPFLLKTYMLVEDPATDDVISWNAKGTAFVVWQPPEFARDLLPTLFKHSNFSSFVRQLNTYVRFGKILHSIRISI

SEQ ID NO: 31582 - protein, 83 aa, Glycine max
  Clone ID: TF_GmC1242_6.pep
MKPLPAEQTGESAPTELQRSIPTPFLTKTYQLVDDPSADDLISWNEDGTSFIVWRPAEFARDLLPKYFKHNNYSSFVRQLNTY

SEQ ID NO: 31583 - protein, 112 aa, Glycine max
  unsure (1)..(112): unsure at all Xaa locations
  Clone ID: TF_jC-gmfl02220076c10a1.pep
ALLLDNCEGILLSXDSHKSEPAPFLTKTYQLVDDPATDHIVSRGEDNTTFAARRPPELERDLVPNYLKHNNFSSXVRQLNTYGSRKIEPDRWEVANEFFQKGEKHLLCQIHK

SEQ ID NO: 31584 - protein, 36 aa, Glycine max
  Clone ID: TF_12689193.pep
WDLLPNYFKHNNFSSYVRQLNTYVCIIHPSCLSSFS

SEQ ID NO: 31585 - protein, 368 aa, Glycine max
  unsure (1)..(368): unsure at all Xaa locations
  Clone ID: TF_GmC5651_1.pep
MALLLDNCESILLSLDTHKSVPAPFLTKTYQLVDDPSTDHIVSWGEDDTTFVVWRPPEFARDLLPNYFKHNNFSSFVRQLNTYGFRKIVPDRWEFANEFFKKGEKNLLCEIHRRKTHHQHHQQVPMNNHHHHHKFGLNVNVPTIFPFHNNRLSVSPSHDSDEVIIPNWCDSPPRGACRCKQQQPTTTRLTATLTAARPNFLGCRCSPRKGCTRIMDLXRDQQGSQNHVKPVAPSNNNNFPSFLLCSDNSNINNNTSPQTQTQAQASPMSKVSTVQRQLKQFVGCYSNNTKQARAVNSPTNSSITIVEEEASSNSCKTKLFGVSLQSKKRVHPEYGSNNVLQSSETNKARLALENDELLGLNLMPPSTC

SEQ ID NO: 31586 - protein, 186 aa, Glycine max
  Clone ID: TF_GmC12036_4.pep
MDGAPQSAGAGGPAPFLLKTYDMVDDASTNDIVSWSSTNNSFVVWNPPEFARLLLPTYFKHNNFSSFIRQLNTYGFRKIHPERWEFANDEFLKDQKHLLKNIYRRKPIHSHSHPPGSLVDPERAAFEEEIDKLSREKTSFESNIYNFKQHQSTAKPKLEDFLQRLDGIEHRQKQLLNFLRGLFRIL

SEQ ID NO: 31587 - protein, 131 aa, Glycine max
  Clone ID: TF_GmC864765_1.pep
MADNYNVLELNIGLGNNNNSKVGGHAGQSPRQRCPAPFLLKTYELLEELSENEKDSTKIVSWNAEGTGFVVWSPAEFSELTLPRYFKHNNFSSFIRQLNTYGCKLLSSYLCELVPGMLQRACWHSLAEGTR

SEQ ID NO: 31588 - protein, 286 aa, Glycine max
  Clone ID: TF_GmC403_2.pep
MSQQQRSMPAPFLTKSYLLVDDPATDDVVSWSEGGNTFVVWKHADFANDLLPKYFKHNNFSSFVRQLNTYGFRKTVPDKWEFANEYFKRGQKDLLAEIKRRKTVSSVSGKSGSGGNISASHSGGDDMGSTSTGSMEAATATVTTTQCADLSGENEKLKKDNEKLSDELARTKKHCDDLVAFLRDSLNVGPDVIDCIIRQGTCGSSNDDAVRFDATENLNNHNHDDDENAVGECEPEQPKGDNGESLKLFGVWLKGQNGKENSIGSCRKRGRQDPIAATAKELKTLV

SEQ ID NO: 31589 - protein, 282 aa, Glycine max
  Clone ID: TF_GmC403_1.pep
MSQQQRSTPAPFLTKTYLLVDDPATDDVVSWSEGGNTFVVWKHADFAKDLLPKYFKHNNFSSFVRQLNTYGFRKTVPDKWEFANEYFKRGQTDLLAEIRRRKVVSPVTGKSTGGGVNISASHSGGDDMGSTSTGSMEAATAAGADISGENEKLKKDNEKLSGELALAKKQCEELVAFLRDSLNVSPDVIERIIRQGTCVSSNNDAVRFDAIINNDLDDDENAVGECEPQQPPPKGDNGESLKLFGVWLKGQNGKENSIGKCRKRGRQDYPIAATAKELKTLV

SEQ ID NO: 31590 - protein, 319 aa, Glycine max
  Clone ID: TF_GmC662_1.pep
MMEHNIIVNNNVIAPFVIKTYNMVNDPTTDKLITWGPANNSFIVLDPLDFSHSLLPTFFKHNNFSSFVRQLNTYGFRKVDPDRWEFANEWFLRGQKHLLRNIVRKKHGGAGRTNSNSHYSHPLKLEELDDEAMVMEIARLKEEQKALEEELHEMNKRLETTEKRPQQMMAFLCKVVEDPQILSRILREREKKHLGEKKRRLIPPPPPTAATSSSSSSGIKTEFEEDEGNYNIKSSSPETGLEIDNNSNNICSPPPLGCWGEQGCYGYNCASVPAPLTVVAPAFPTMGGGYLRRGGFWGEMAAEGNAVPPYPFSLLEGGF

SEQ ID NO: 31591 - protein, 283 aa, Glycine max
  Clone ID: TF_GmC114_1.pep
MSQRSVPAPFLTKTYQLVEDQGTDQVISWGESGNTFVVWKHADFAKDLLPKYFKHNNFSSFVRQLNTYGFRKIVPDKWEFANEHFKRGQKELLSEIKRRKTVPQSSAHPPEAGKSGGDGNSPLNSGSDDAGSTSTSSSSSGSKNQGSVETNTTPSHQLSSENEKLKKDNETLSCELARARKQCDELVAFLRDRLMVGPDQIDRIMRQGSCGSENAVGEGGGGGHCLKLFGVWLKGDTLTDKRNNHKRGREDQMGFGGPRLKESKPVVDFSRNRMMMINEKGKG

SEQ ID NO: 31592 - protein, 282 aa, Glycine max
  Clone ID: TF_GmC114_2.pep
MSQRSVPAPFLTKTYQLVEDQGTDQVISWGESGNTFVVWKHADFAKDLLPKYFKHNNFSSFVRQLNTYGFRKIVPDKWEFANEHFKRGQKELLSEIKRRKTVPQSSAHPPEAGKSGGDGNSPLNSGSDDAGSTSTSSSSSGSKNQGSVETNTTPSHQLSSENEKLKKDNETLSCELARARKQCDELVAFLRDRLMVGPDQIDRIMRQGSCGSENVVGEGGGGDCLKLFGVWLKGDTLTDKRNNHKRGREDQMGFGGPRLKESKPVVDFGAVNIMMKSNRVCN

SEQ ID NO: 31593 - protein, 124 aa, Glycine max
  Clone ID: TF_11689459.pep
NMVFTFESQKSVPAPFLTKTYQLVDDPHTDHIVSWGEDETTFVVWKPPEFARDLLPNYFKHNNFSSFVRQLNTYVSILIFSYVLLYNPYSSSLLHFTSLSLKVKLFPFEQIDQILMLEVKYDGT

SEQ ID NO: 31594 - protein, 339 aa, Glycine max
  unsure (1)..(339): unsure at all Xaa locations
  Clone ID: TF_GmC1086_1.pep
MVVPQPIEGLHETGPPPFLTKTYDIVDDPSTNHIVSWSTGNNSFVVWDPQAFSVTLLPKFFKHNNFSXFVRQLNTYGFKKVDPDKWEFANEMFLRGQRILLKNIRRRKANHHQSHQHAMQQGVEEPFVEVGQFELDGEIDRLRRDRQVLMVELVKLRQQQQSTKSHLQEMEGRIKMTEQKQKQMMNFLARAMQNPNFVQQLAQQKECSRELEEVFSNKKRRPIDQGPNVVEVADDDDELLGCAEECSDFVKLEPQEYYSDDKVLEFEVPDLDLALNLDEENIESQKRIMEEEHVQLENSRERYIDEVFWQDLLNEGIEDQGVLGVEDVDVLAKQLGYLA

SEQ ID NO: 31595 - protein, 142 aa, Glycine max
  Clone ID: TF_GmC1242_3.pep
MAPLPAEQTGESAPTELQRSIPTPFLTKTYQLVDDPSADDLISWNEDGTSFIVWRPAEFARDLLPKYFKHNNFSSFVRQLNTYGFRKVVPDRWEFANDCFRRGERALLRDIQRRKLLPVPRRARRGTRRKQRFRSCLGFRLD

SEQ ID NO: 31596 - protein, 423 aa, Glycine max
  Clone ID: TF_GmC802_1.pep
MNSSPSSSQLPSSSADFDKFNSLPRFRPLECLQGNPVPAFLSKTFELVDDPSLDPIISWGSTGVSFVVWDPTLFARHVLPRNFKHNNFSSFVRQLNTYGFRKIDTEKWEFFNEAFQRGKRHLLKNIRRRGPPQSHQVGGNIVPYSDADKAGLEFELESLRKERSVLMQEVVELQQQQRTTLQRARQVNQRLQSAELIQKQMVSFLARLFEKPAFLTSLQHAKEQRDLGCPKVRRRFIKQHQGQTEISDFLNEGQIVRYQPDWRNVTTSSEIQEMYPVSLEESPNYLSQALAKEFSEGTENLISDEVMSIADTMGFKSSSFGLDGNLFKGKNVMSSNEGLLAEEFVSFPEDLTKETGFPEFSPLGTEGIIKREDKRNTNFDVSGADSSSGNEQWGNPINYEVPEFVVTSGMTDMWDINYLTHSK

SEQ ID NO: 31597 - protein, 62 aa, Glycine max
  unsure (1)..(62): unsure at all Xaa locations
  Clone ID: TF_GmC790_2.pep
MMEEAQGNSSSLPPFLTKTYEMVDDPSTNSIVSWSATNRSFIVWNPPEFSRDLVPQXLKHNN

SEQ ID NO: 31598 - protein, 133 aa, Glycine max
  Clone ID: TF_GmC5805_1.pep
VSWSRGNNSFVVWDPQAFSITLLPRYFKHNNFSSFVRQLNTYGFRKVDPDKWEFANEGFLRGQKHLLKNIRRKKTLTNQQQALPIDHCVEVGRFGSLDGEVDALRRDKQVLMVELVKLRQQQQNTRSFLHSLC

SEQ ID NO: 31599 - protein, 78 aa, Glycine max
  Clone ID: TF_GmC1855_4.pep
MEGGGSTPAAPIPNANAPPPFLSKTYDMVEDPSTDAIVSWSATNNSFIVWDPPEFARDLLPKYFKHNNFSSFVRQLNT

SEQ ID NO: 31600 - protein, 75 aa, Glycine max
  unsure (1)..(75): unsure at all Xaa locations
  Clone ID: TF_LIB3139-119-P1-N1-A12.pep
HIVRVFFSILTNTYHYVXDHFTDQVISWCECFNXFFLFKLAYYAKDLFSYYFKHNNFFSFIRQLNTYGFLKIVPY

SEQ ID NO: 31601 - protein, 203 aa, Glycine max
  unsure (1)..(203): unsure at all Xaa locations
  Clone ID: TF_GmC1065_1.pep
MKGVTVKVEETMAYANAASTSPTTSSNLSPQPMEGLHEVGPPPFLTKTFDVVEDPSTNDIVSWSRSRNSFVVWDSHKFSTTILPRYFKHNNFSSFVRQLNTYGFRKIDPDKWXFANEGFLAGQRQLLKTIKRRRHVTVTQTQSHEGGSGACVELGEFGLEGEMERLRRDRTVLMAEIVRLRQQQHNSREQLGEVEERQDSVDG

SEQ ID NO: 31602 - protein, 167 aa, Glycine max
  Clone ID: TF_11413503.pep
MSSDKLKSKSKNKFAVDDSIPTFIRKTYEILEENKFPDIIDWNYEGLALIIKKPAEFCQKVLPLYFKHNNLTSFIRQLNMYNFHKRRTQDVDHIYCHELFQRGKKHLLKDIRRKNNEHSLTIKSMDMLENINSNDNTGLLQENQLLKILNKEAAVKVSTYEKKIKDL

SEQ ID NO: 31603 - protein, 464 aa, Glycine max
  Clone ID: TF_GmC58_1.pep
MEGASWNSSVCVAPFLSKTYDMVDDPSTDLVVSWGENNNSFVVWNVPQFATDILPNHFKHNNFSSFVRQLNTYGFRKVDPDRWEFANEGFLRGEKQLLKSISRRKSAHVNGSQQASQVHKSAAGACVEVGKFGLEEEVERLKRDKNVLMQELVRLRQKQQGTDNQLQNVGQRVQSMEQRQQQMMSFLAKAMQSPGFLAQFVQQQNESSKHIPGSNKKRRLQRQEEDSLATKDLHSSLDGHIVKYQSSINEAAKALFRQILQINNSTTQSSIKNPDVFLIDDIPSAIASDSSSSSTQVSNVMVPPISELTSMEVGSQFPLSCMPSNISEVQSSPAVLGFCRSQGMETESSLLNHELNVMGADTRNMGEIDMMSTVLDEADEADHFSPDTDGISKLPEISDEFWELFLRPSPLTEDTEETKCSSLGCGLTEDQGLPSEMGNKQENFDTIQHVDCLTQQMGLHALEY

SEQ ID NO: 31604 - protein, 111 aa, Glycine max
  Clone ID: TF_LIB3065-001-Q1-N1-A6.pep
MQKRTKPNIIENQKNGGRCLQPTTSINKGLPTTTVLVCHPIKFGRVLVGTYFKHIICSILIRHLNTYRFRQIHTERWEYANDEFLPDPKHVIPNIHSRKPIHSHRHSASSL

SEQ ID NO: 31605 - protein, 108 aa, Glycine max
  Clone ID: TF_jC-gmro02910071a08a1.pep
MAPPPPVEHNGDSAATASASASAESQRSIPTPFLTKTYQLVDDQSIDDVISWNDDGSTFIVWNPTVFARDLLPKFFKHNNFSSFVRQLNTYVIISIQLFGLVFFFFFA

SEQ ID NO: 31606 - protein, 396 aa, Glycine max
  Clone ID: TF_700891365_FLI.pep
ISNLQGFRKVDPDRWEFANEGFLRGEKQLLKSISRRKSAHVNGSQQASQVHKSAAGACVEVGKFGLEEEVERLKRDKNVLMQELVRLRQKQQGTDNQLQNVGQRVQSMEQRQQQMMSFLAKAMQSPGFLAQFVQQQNESSKHIPGSNKKRRLQRQEEDSLATKDLHSSLDGHIVKYQSSINEAAKALFRQILQINNSTTQSSIKNPDVFLIDDIPSAIASDSSSSSTQVSNVMVPPISELTSMEVGSQFPLSCMPSNISEVQSSPAVLGFCRSQGLETESSLLNHELNVMGADTRNMGEIDMMSTVLDEADEADHFSPDTDGISKLPEISDEFWELFLRPSPLTEDTEETKCSSLGCGLTEDQGLPSEMGNKQENFDTIQHVDCLTQQMGLHALEY

SEQ ID NO: 31607 - protein, 396 aa, Glycine max
  Clone ID: TF_GmC58_2.pep
ISNLQGFRKVDPDRWEFANEGFLRGEKQLLKSISRRKSAHVNGSQQASQVHKSAAGACVEVGKFGLEEEVERLKRDKNVLMQELVRLRQKQQGTDNQLQNVGQRVQSMEQRQQQMMSFLAKAMQSPGFLAQFVQQQNESSKHIPGSNKKRRLQRQEEDSLATKDLHSSLDGHIVKYQSSINEAAKALFRQILQINNSTTQSSIKNPDVFLIDDIPSAIASDSSSSSTQVSNVMVPPISELTSMEVGSQFPLSCMPSNISEVQSSPAVLGFCRSQGMETESSLLNHELNVMGADTRNMGEIDMMSTVLDEADEADHFSPDTDGISKLPEISDEFWELFLRPSPLTEDTEETKCSSLGCGLTEDQGLPSEMGNKQENFDTIQHVDCLTQQMGLHALEY

SEQ ID NO: 31608 - protein, 146 aa, Glycine max
  unsure (1)..(146): unsure at all Xaa locations
  Clone ID: TF_GmC1855_3.pep
MDGRASSSVGGEASPAPAPVPITNANAPPPFLSKTYEMVEDPSTDSIVSWSPTNNSFVVWNPPEFARDLLPKHFKHNNFSSFVRQLNTYGFRKVDPDRWEFANEGFLRGQKHLLKTITRRKPAHGHNQQAQQAHGXESSVXACVES

SEQ ID NO: 31609 - protein, 231 aa, Glycine max
  Clone ID: TF_GmC92665_1.pep
MEGTSEKGLWECGRKCTPPPFLLKTYMLVDDPATDDVVSWNSEGTAFVVWQPAEFARDLLPTLFKHSNFSSFVRQLNTYGFRKIATSRWEFFNERFKKGERELLHEIRRRKAWTSKQQPNAPNQATLQDSDEDQRSSSISSSSGYTTLVDENKRLKKENGVLNSELTSMKRKCKELLDLVAKYSSHAKEEKEDERPMLFGVRLDVQGEREMKRHRAEMSESASIMLSQSCK

SEQ ID NO: 31610 - protein, 90 aa, Glycine max
  unsure (1)..(90): unsure at all Xaa locations
  Clone ID: TF_GmC62779_1.pep
TAPAXYPGXARVPIWNHPETEKELFFLFNAISHLSLLAFLFQVQGFNNVTAIFIFNLIIVALRASFYIFSRPGKEESLVIIFGEIQPMIL

SEQ ID NO: 31611 - protein, 73 aa, Glycine max
  unsure (1)..(73): unsure at all Xaa locations
  Clone ID: TF_jC-gmXLIB3563P024ab12a1.pep
RLPLTGHSGSRLLSNRCKGCTTVGHSPILKKTSEMVYDPHTNPIVSWSQTRHIFLIXDSHEFCKALISKYFKH

SEQ ID NO: 31612 - protein, 149 aa, Glycine max
  Clone ID: TF_GmC1873_1.pep
DGKGFLSDSQSSVSPGKLSSTAEFSWQVGSDTSHCKVFMESEDVGRTLDLSCLSSYQELYMRLANMFGIERSDMLSHVLYCDSSGALKQIGEEPFSEFMKTAKRLTILTDSNNKDSRSLFCRVWITGTRNAEHGLDAASNKTGPLSIFA

SEQ ID NO: 31613 - protein, 72 aa, Glycine max
  Clone ID: TF_jC-gmle01810073g03d1.pep
AGGILSKGSVTRHPIRVLLVGSGQYTLVYEVNEGVRMLVGDVPWHMFVSTVKSLRVLKSSNPRAFTLGSKQD

SEQ ID NO: 31614 - protein, 67 aa, Glycine max
  unsure (1)..(67): unsure at all Xaa locations
  Clone ID: TF_6725509.pep
FMNKSKLMVLLNSCEYAPSYEDKNGDXMFVGNAPWEMSVESPTRLRKMKGSKAMGLAPRHMEKCKSR

SEQ ID NO: 31615 - protein, 69 aa, Glycine max
  Clone ID: TF_10709975.pep
GALFVMVIMDGASYLRKVDLKSYTSYHVLSTAFEKMFLTCPTLSQSGSHGAPRGLLLRDRMLMDLLPGP

SEQ ID NO: 31616 - protein, 77 aa, Glycine max
  Clone ID: TF_LIB4200-008-Q1-N1-G8.pep
FFLMVIGETIFSYLFIFSCHLTCREFCNMVKRIFICSREDLKKMKCCKLPAFSSEVEEVLLSPDSQNRDETQQSHMP

SEQ ID NO: 31617 - protein, 101 aa, Glycine max
  Clone ID: TF_GmC1873_2.pep
EFSWQVGSDTSHCKVFIESEDVGRTLDLSCLGSYEELYMRLANMFGIERSEMLSHVLYRDAAGALKQTGEEPFSEFMKTAKRLTILTDSNNKDSRRWEKEN

SEQ ID NO: 31618 - protein, 56 aa, Glycine max
  Clone ID: TF_7285393.pep
YTISESGSHGAPGGEMLSESKVRDVVHGSEYVLSYEDKDGDGMPCGDVRWEMCLDI

SEQ ID NO: 31619 - protein, 47 aa, Glycine max
  Clone ID: TF_LIB3242-736-P1-J1-A7.pep
FEEVVESSLFTFSKKQGECFQVGHVPWQSFIGSVRRLVILTNGSETI

SEQ ID NO: 31620 - protein, 199 aa, Glycine max
  Clone ID: TF_GmC234576_1.pep
MELQLGLALSTHSRAYDQPFSHKKRTFSQLMMMEHAPPPHHVMLPTLSLLPLTPSHHVVDDHHSQCSNITKDEEEEGVVGWPPVNHWRKKLHVEEVVGNNNNIDHMVWVDHRQTHSLQGYSSNTLYVKVKMEGVGIARKVDLSMHQSFHTLKETLMDMFGKCHHQQSNNYELAYLDKEGDWLLAQDVPWRQVHPTYLSP

SEQ ID NO: 31621 - protein, 64 aa, Glycine max
  unsure (1)..(64): unsure at all Xaa locations
  Clone ID: TF_12689612.pep
LENMFNCTCGXYSVREGINGFXYAPTYENQDGDNMLVGYVPWYLFVSIGNTLMMTIGIKPKGYG

SEQ ID NO: 31622 - protein, 124 aa, Glycine max
  Clone ID: TF_GmC31466_2.pep
HASGQQSHHPFVNIYSQVPAEVNDCSNDHSSFFVKVYMEGIPIGRKLNILAHGGYYELVRTLEHMFDTTILWGTEMNGVQPERCHVLTYEDEEGDLVMVGDVPWEMFLSTVKRLKITRVDTFGC

SEQ ID NO: 31623 - protein, 72 aa, Glycine max
  Clone ID: TF_GmC6795_2.pep
NSARAKLLDGSSKFVLTYEDKEGDWMLVGDVPWGMFFSSVRRLRIMRTSEANGLGKQMLYFSKHNLPMFFFC

SEQ ID NO: 31624 - protein, 129 aa, Glycine max
  Clone ID: TF_12487451.pep
MMDHAAPPESTLTDHVMLPTLSLLPLTPNHHHDDDHHSQCSNITKDDEEEESVVGWPPVNYHWRKKLRVDEGVRNNNNNNHMVSVADHRHHSVYVKVKMEGVGIAREVDLSMHQSFHTLKQTLDGHVWM

SEQ ID NO: 31625 - protein, 49 aa, Glycine max
  Clone ID: TF_LIB3242-504-P1-K1-C5.pep
SWPPASKNNDPVDGKPGAAALFVKVSMDGAPYLRKVDLTNYTMYQELMI

SEQ ID NO: 31626 - protein, 96 aa, Glycine max
  Clone ID: TF_jC-gmst02400037e07d2.pep
IFFPTKQKTPDTFKVTTLRSIVSVKGFIFIYIFFGPLWDGISSNIVLGPLQLLLLHFSIAFGASPIAFDPFIIRRRLGDSTNISHGESPTSIPSPS

SEQ ID NO: 31627 - protein, 46 aa, Glycine max
  Clone ID: TF_6964391.pep
EYKDGDCMLVGDVPREMFTDSCLRLKIMKSLETIELAPRAMDKCKS

SEQ ID NO: 31628 - protein, 148 aa, Glycine max
  Clone ID: TF_GmC573_11.pep
PFRPRAQVVGWPPVRSYRKNTLQQKKEEQGEGSGMYVKVSMAGAPYLRKIDLNVYKSYPELLKALGNMFKCTFGKNLEQVLNNLLLFFLAFLRLIWHIYVYVERRNKVVIACDPGEYSEREGYNGSEYAPTYEDKDGDWMLVGDVPWK

SEQ ID NO: 31629 - protein, 307 aa, Glycine max
  Clone ID: TF_GmC1078_1.pep
MSRALEHDYIGLAENPSMDGKNSSSLNLKETELRLGLPGCESPERKSGSALCLFGKELQNNNNNVCSLKAGAKRGFSDAIDTSSVTEGSQGASALFSPRGGNVGKPLIGLDTQTNTTIKEVGAVPQSAKPVQENNDQFAATNAHAIAPAAKAQVVGWPPIRSFRKNTMASNLTKNNDEAEGKSGFGCLYVKVSMDGAPYLRKVDLKTYNNYMELSSALEKMFSCFTIGQCNSPGLPGKDGLSESSLRDLLHGSEYVLTYEDKDGDWMLVGDVPWEMFTDSCRRLRIMKGSEAIGLAPRAMEKSRSQN

SEQ ID NO: 31630 - protein, 319 aa, Glycine max
  Clone ID: TF_GmC1078_2.pep
MSRALEHDYIGLAENPSMDGSSDKLSSEDGKTSSLNLKETELRLGLPGCESPERKSGSALCLFGKELQNNNNVCSVVSPLKAGAKRGFSDVTEGSQGAALFSPRGANVGKPIIGLDTQTNTQQQANTTIKEVGAVLPQSTKPVQEKNDQVAATNGHASAPAAKAQVVGWPPIRSFRKNTMASNLTKNNDDDEGKSGFGCLYVKVSMDGAPYLRKVDLKTYNNYMELSSALEKMFSCFTIGQCNSPGLPGKDGLSESSLRDLLHGSEYVLTYEDKDGDWMLVGDVPWEMFTDSCRRLRIMKGSEAIGLAPRAMEKSRSQN

SEQ ID NO: 31631 - protein, 47 aa, Glycine max
  Clone ID: TF_21676827.pep
ENEEGDWMLAEKGPWKMITDSCERLRMMKSAESLGLSPKAMEKCKSR

SEQ ID NO: 31632 - protein, 53 aa, Glycine max
  unsure (1)..(53): unsure at all Xaa locations
  Clone ID: TF_uC-gmroLIB3259P227g10a1.pep
YVLTYEDKDGDWMLVGXVPWEMFIDTCKRLKIMKGSDAIGLAPRAMEKSKSRS

SEQ ID NO: 31633 - protein, 105 aa, Glycine max
  Clone ID: TF_GmC573_15.pep
VEQQGDGSGTYLKVSMAGAPYLRKIDLKVYNSYPELLIRLQVNSDIYPGEYSEREGYNGSEYAPTYEDKDGDWMLVGDVPWNMFVSSCKRLKIIKGSEAKGLGCL

SEQ ID NO: 31634 - protein, 167 aa, Glycine max
  Clone ID: TF_uC-gmroLIB3258P131f02b1.pep
CTNQPTALGASVLKETVPHSPKPLHENKPQISAPAAKAQVVGWPPIRSFRKNSMASQPQKNDAAADAEAKSGCLYVKVSMEGAPYLRKVDLNSFTTYKDLSLALEKMFSCFTLKYVLTYEDKDGDWMLVGDVPWEMFTESCKRLRIMKSSEAIGLAPRAMEKCKSRY

SEQ ID NO: 31635 - protein, 294 aa, Glycine max
  Clone ID: TF_GmC166_1.pep
MSEALEEVVPSMKGGCEEEGLNLKATELRLGLPGCESPEREGVFKSVVVSGAKRGFSDAIDGNWNGGGSEKDAAALFSPTSRGAVSVSVSAAKSLTLTATDCTNQPTALGASVLKETVPHSPKPLHENKPQISAPAAKAQVVGWPPIRSFRKNSMASQPQKNDAAADAEAKSGCLYVKVSMEGAPYLRKVDLNSFTTYKDLSLALEKMFSCFTLSQCGSYGVSSRENLSESRLMDLLHGSEYVLTYEDKDGDWMLVGDVPWEMFTESCKRLRIMKSSEAIGLAPRAMEKCKSRY

SEQ ID NO: 31636 - protein, 127 aa, Glycine max
  Clone ID: TF_GmC166_3.pep
QIPSLDAFIGKVSMEGAPYLRKVDLNSFTTYKDLSLALEKMFSCFTLSQCGSYGVSSRENLSESRLMDLLHGSEYVLTYEDKDGDWMLVGDVPWEMFTESCKRLRIMKSSEAIGLAPRAMEKCKSRY

SEQ ID NO: 31637 - protein, 109 aa, Glycine max
  Clone ID: TF_GmC2301_8.pep
SILRSTLVGKQSYLSQRPSLFVKVYMEGIPIGRKLNLMAHYGYDGLVKTLGHMFRTNILCPNSQPLNSGNFHVLTYEDQEGDWMMVGDVPWEMFLNSVKRLKITRADRC

SEQ ID NO: 31638 - protein, 170 aa, Glycine max
  Clone ID: TF_GmC371_5.pep
IDGSANNNNSAPATKAHVVGWAAIRSFRKNSLATTSKNNEVVDGKKGVGALFVKVSMDGAPYLRKVDLKNYSTYPELSSALEKMFSCFTISKCGSHGILGREMLNETKLKDLLHGSEYVLTYEDKDGDWMLVGDVPWEMFIETCKRLRIMKSSDAIGLAPRAVEKSKSRT

SEQ ID NO: 31639 - protein, 352 aa, Glycine max
  Clone ID: TF_GmC183_2.pep
MSPPLLVTEDEGQCHASMVASASSPSLNCFSLNEAGFKECNYLGLSDCSSVDSSTVPNLSDEKKENLNLKATELRLGLPGSQSPERETELFSLSSTKLDEKPLFPLLPTKDGICSLSQKTVVSGNKRGFADTMDPEFPGNAGINMMLSPKPSGVQPTTVKEIPSKVLQELPSAANGTGHNHTSGASISGSAPAAKAQVVGWPPIRSFRKNSLATTTNKNNDEVDGKPGVGALFVKVSMDGAPYLRKVDLRSYTTYQELSSALEKMFLSCFTLGQCGSHGAPGREMLSESKLRDLLHGSEYVLTYEDKDGDWMLVGDVPWEMFIDTCKRLKIMKGSDAIGLAPRAMEKSKSRS

SEQ ID NO: 31640 - protein, 252 aa, Glycine max
  Clone ID: TF_GmC1199_1.pep
MEVGLKKENMGFEETELRLGLPGNGGTEEVLIRKRGFSETETGHEDESATTVDLMLNLSSKEAATTAAAAADPTDKHKTLPKEKTLLPADPAKPPAKTQVVGWPPVRSFRKNMLAVQKSVGEESEKNSSPNASFVKVSMDGAPYLRKVDLKMYKSYRELSDSLGKMFSSFTIGNCESQGMKDFMNESKLNDLLNSSDYVPTYEDKDGDWMLVGDVPWEMFVESCKRLRIMKGKEAIGLGLAPRAMAKSKNRS

SEQ ID NO: 31641 - protein, 194 aa, Glycine max
  Clone ID: TF_GmC2301_5.pep
MGTLEQIDAPQTRSSSSSSSSIDSNNHPSRTRTPPPSSPSSSACRNRTDLSTDLRLGLSISPSSQSELPFNSTPREESFDWPPIKSILRSTLVGKQSHLSQRPSLFVKVYMEGIPIGRKLNLMAHYSYDGLVKTLGHMFRTNILCPNSQPLNSRNFHVLTYEDQEGDWMMVGDVPWEMFLNSVKRLKITRADRC

SEQ ID NO: 31642 - protein, 184 aa, Glycine max
  unsure (1)..(184): unsure at all Xaa locations
  Clone ID: TF_uC-gmroLIB3259P204h02a1.pep
RANDPAKPPAKAQVVGWPPVRSFRKNIVQRNKNEEEAAFVKVSMDGAPYLRKVDIKLYKSYQELSDALAKMFSSFTIEKCGSQGMKDFMNETKLIDLLNGSDYVPTYQDKDGDWMLVGDVPWESVPLFIPLFPFFFLXFIIPLYYSFSQFHRMFVESCQRLRIMKGSEAIGLAPRAVEKCKNRS

SEQ ID NO: 31643 - protein, 161 aa, Glycine max
  unsure (1)..(161): unsure at all Xaa locations
  Clone ID: TF_uC-gmrominsoy311g10b1.pep
FIRSFRKNSMATTSNKNNDEVDGKPGVGALFVKVSMDGAPYLRKVDLRSYTTYQELSSALEKMFLSCFTLGQCGSHGAPGREMLSESKLRDLLHGSEYVLTYEDKDGDLDCLXGDVPWEMFIDTCKRLKIMKGSDAIGLVCLSRSSWLTAPRAMEKSKSRS

SEQ ID NO: 31644 - protein, 222 aa, Glycine max
  unsure (1)..(222): unsure at all Xaa locations
  Clone ID: TF_GmC435_4.pep
MDERSRNEASPQLLDLISNEREWQMNKRNEGKSSEERKLELRLGPPGEDWSLGGKMKNTEREESLLSLGCFSPNNGXFSPSSANTAVSQPNTSQKRTAPAPVVGWPPIRSFRKNLASSSSASKPPPESQAEQHNKVAGKKPVDNYANNKGLFVKINMDGVPIGRKVDLNAYDSYENLSSAVDELFRGLLAAQRDSSAGGVHNKXEEEKAITXLLDGSGEYTL

SEQ ID NO: 31645 - protein, 293 aa, Glycine max
  unsure (1)..(293): unsure at all Xaa locations
  Clone ID: TF_GmC1825_3.pep
MTTMLTNEHGLSLNLKETELCLGLPGGGSEVETPRATGKRGFSETVDLKLNLQTKEDLNENLKNVSKEKTLLKDPAKPPAKAQVVGWPPVRSYRKNMMAVQKVSNEEVAEKTTSSTIANSGAFVQVSMDGAPYLRKVDLPMYKSYIRLIXCLGQNVQLLHHGYLWGPRNDIFMNDSKLMDLPPSSEYVPPHQNTDGDWMLVGDVPWEMFVVVMQPPGEIMNGSETIGPCVQNIGKMQKQKGKLAQYNVLREIPYATGPMEQIISPTSATLWSGMLLVECVWCLAFCSYKDCVV

SEQ ID NO: 31646 - protein, 174 aa, Glycine max
  Clone ID: TF_GmC870_1.pep
ENNRDAQQELSSSMVSQTFGVPDMAFNSIDSTIDDSNFLNSGPWAPPPAPPPLPPAQFQRMRTYTKVYKRGAVGRSIDITRYSGYEELKKDLARRFGIEGQLEDRQRIGWKLVYVDHESDVLLVGDDPWEEFVNCVRCIKILSPQEVQQMSLDGDFGNGGLQNQACSSSDGGNT

SEQ ID NO: 31647 - protein, 220 aa, Glycine max
  Clone ID: TF_GmC1199_4.pep
MEVGLNKKENMGFEETELRLGLPGNVGGTGTEEVLIRKRGFSETETETEEDESATTVDLMLNLSSKEAAAAADPTDKHKTLPKEKTLLPADPAKPPAKAQVVGWPPVRSFRKNMLAVQKSVGEENEKNSSSPNASFVKVSMDGAPYLRKVDLKMYKSYPELSDALGKMFSSFTIGNCESQGFKDFMNESKLMDLLNSSDYVPTYEDRDGDWMLVGDVPWE

SEQ ID NO: 31648 - protein, 117 aa, Glycine max
  Clone ID: TF_GmC183_4.pep
VSMDGAPYLRKVDLRSYTTYQELSSALEKMFLSCFTLGQCGSHGAPGREMLSESKLRDLLHGSEYVLTYEDKDGDWMLVGDVPWEMFIETCKRLKIMKGSDAIGLAPRAMEKSKSRI

SEQ ID NO: 31649 - protein, 187 aa, Glycine max
  Clone ID: TF_GmC590_3.pep
MAKEGLGLEITELRLGLPDAEHVTVVNKNEKKRAFSQIDDENSSSGGDRKIKTNKSQVVGWPPVCSYRKKNSMNEGSKMYVKVSMDGAPFLRKIDLGLHKGYSDLALALDKLFGSYGMVEALKNADNSEHVPIYEDKDGDWMLVGDVPWEMFMESCKRLRIMKRSDAKGFGLQPKGSLKGFIESAAK

SEQ ID NO: 31650 - protein, 129 aa, Glycine max
  Clone ID: TF_GmC183_3.pep
VDGNRGAAALFVKVSMDGAPYLRKVDLRNYTMYQELSSALEKMFSCFTLGQCGSHGAPGREMLSESKLKDLLHGSEYVLTYEDKDGDWMLVGDVPWDMFIDTCKRLKIMKGSDAIGLAPRAMEKSRSRC

SEQ ID NO: 31651 - protein, 69 aa, Glycine max
  Clone ID: TF_jC-gmle01810061b03a1.pep
YVLTYEDKDGDRMLAGDVPWDMLIETCKKLRIMLSSEAIGLAATAVRKKAEHDLGSSCVAVYASNCLRD

SEQ ID NO: 31652 - protein, 55 aa, Glycine max
  unsure (1)..(55): unsure at all Xaa locations
  Clone ID: TF_LIB4366-010-R1-N1-F12.pep
SENVFSLEAKEGEWRLVGDVPGGKFPEFCKRLRIIKSFXAIGVAPKALEKGKSRS

SEQ ID NO: 31653 - protein, 77 aa, Glycine max
  Clone ID: TF_GmC435_6.pep
EGKCESSNLSKKLTEIFRSFASVYRHFKSSFRKKKKKKTHSSHYLVVMYATSFIPCSFHQTIEPKRQIRKSLQVFSR

SEQ ID NO: 31654 - protein, 301 aa, Glycine max
  Clone ID: TF_GmC1129_1.pep
SFSQDGTSQLLNLSGSNSVMSSAAMLPKQITTEPPQLPSAAPQCVLPQVENLGTSQSNVSELAALPPFAGREHSAYHAAADPQSNLLFGINIDPSSLMLQNGMSNLRNIGNVNNSLSLPFSASNCGGASGTDFPLSSNMTTSSCVDESGFLQSSENVDQANTPTGTFVKVHKSGSFGRSLDISKFSSYDELISELARMFGLEGQLEDPKTQRSGWQLVFVDRENDVLLLGDDPWQEFVNNVWYIKILSPLEVQQMGKGLSPSTSAPGNKLSTPANSCDNYVSQQELRSSRNGMASMGSFHY

SEQ ID NO: 31655 - protein, 276 aa, Glycine max
  Clone ID: TF_GmC22_1.pep
MGTLGRAIYSVGNWIRETGQAIDRLGSRLQGGYYFQEQLSRHRTLMNIFDKAPVVDKDVFVAPSASVIGDVQLGRGSSIWYGVVLRGDVNIIRVGNGTNIQDNSLVHVAKSNLSGKVLPTIIGDNVTVGHSAVIHGCTVEDEAFVGMGAILLDGVVVEKNAMVAAGALVRQNTRIPSGEVWAGNPAKFLRKLTDEEIAFISQSATNYTNLAQVHAAENSKSFDEIEFEKVLRKKFARKDEEYDSMLGVVREIPPELILPDNVLPDKAEKALKKSGI

SEQ ID NO: 31656 - protein, 107 aa, Glycine max
  Clone ID: TF_uC-gmropic110e02b1.pep
LPFVRPTSLPAPRELLLILLLPITVPGSNGEDYGIIIGGERHSKLLDGSSKFVLTYEDKEGDWMLVGDVPWGMFLSSVRRLRIMRTSEANGLAPRLEENIKQRCKPI

SEQ ID NO: 31657 - protein, 145 aa, Glycine max
  Clone ID: TF_GmC224473_1.pep
STHASATTQNLQNSAKRSCTKVHKQGSLVGRAIDLSRLSGYNDLLSELERLFSMEGLLKDPDKGWKILYTDSENDIMVVGDDPWHEFCDVVSKIHIYTQEEVEKMTIEMISDDTHSCLEEAPVIMEASKSSSVGQPDYSPTAVRV

SEQ ID NO: 31658 - protein, 222 aa, Glycine max
  Clone ID: TF_GmC26770_1.pep
MEVDLVLALPTQNSVEEFKLNKSKQIVSLQLWRASCGSESEKRVKHNKRSFEESFGHFLKPFPLLVWSGQPNEEEDRSEKVQRNIHTPNKNGDEENHLVGWPPVKSWRRKELHQQHPARGQIRNDRIQANENQSRRPNSLYVKVNMEGVAIGRKINLRLFNSYQTLTSSLISMFAKCILNFLCYARYQKFEEVGESYTLNFQNEQGDWLQVGHVPWQYVHIL

SEQ ID NO: 31659 - protein, 106 aa, Glycine max
  Clone ID: TF_GmC570_3.pep
GYDELRHDLARMFGIEGQLEDPQRTEWKLVYVDHENDILLVGDDPWEEFVSCVQSIKILSSSEVQQMSLDGDLGHVPVPNQACSGTDNGNAWRGQYDDNSAASFNR

SEQ ID NO: 31660 - protein, 159 aa, Glycine max
  Clone ID: TF_GmC624_1.pep
MFLLWEQVVGWPPIRSFRKNSMATQPQKNDDNAEAKSVCLYVKVSMDGAPYLRKVDLKNFGTYMELSSALEKMFSCFTISQCGSHGVCGRDKLTENRLMDLLHGSEYVLTYEDKDGDWMLVGDVPWEMFTDSCKRLRIMKSSEAIGLAPRAMEKCKSRN

SEQ ID NO: 31661 - protein, 202 aa, Glycine max
  Clone ID: TF_GmC573_13.pep
MENSLGKYGKELNLEATELRLGLPGSDEPEKRSAVRSNKRSSPEASEEECISKGNMNSSDGSDITSDDQDNVVPPAKAQVVGWPPVRSYRKNSLQQKKEEQAEGAGMYVKVSMEGAPYLRKIDLKVYKSYPELLKALENMFKCTFGQYSEREGYNGSEYAPTYEDKDGDWMLVGDVPWNMFVSSCKRLRIMKGSEAKGLGCF

SEQ ID NO: 31662 - protein, 103 aa, Glycine max
  Clone ID: TF_LIB4167-012-R1-N1-A10.pep
RPLPLPISKHPLKKTNHPFVSGPESPNMDSHSIGLIWKPQERQTFFICMLLSPEGPHPWDLQPFYRGKKHSPRDIPTQNKIPFSYLKSKNMTSFGWPPLLLSP

SEQ ID NO: 31663 - protein, 194 aa, Glycine max
  Clone ID: TF_GmC960_2.pep
MENTTVTYQTDLNLKATELRLGLPGTEESEEKTLSAGARINNKRPLTETSDECASNGTSSAPHEKTETAPPAKTKIVGWPPIRSYRKNILQESEGAGIYVKVSMDGAPYLRKIDLKVYGSYTQLLKSLENMFKLTISEYSEREGYKGSEYAPTYEDKDGDWMLVGDVPWDMFMTSCKRLRVMKGSEARGLGCGV

SEQ ID NO: 31664 - protein, 105 aa, Glycine max
  Clone ID: TF_LIB3242-425-P1-N1-E9.pep
VDLKNYSTYPELSSALEKMFSCFTISKCGSHGILGREMLNETKLKDLLHGSEYVLTYEDKDGDWMLVGDVPWEMFIETCKRLRIMKSSDAIGLAPRAVEKSKSRT

SEQ ID NO: 31665 - protein, 62 aa, Glycine max
  unsure (1)..(62): unsure at all Xaa locations
  Clone ID: TF_GmC1078_3.pep
ARGESSLRDLLHGSEYVLTYEDKDGDWMLXMFTDSCRRLRIMKGSEAIGLAPRAMEKSRSQN

SEQ ID NO: 31666 - protein, 110 aa, Glycine max
  Clone ID: TF_GmC274615_1.pep
RLSSYNDLLIELERLFSMEGLLIDPNKGWRILYTDSENDIMVVGDDPWHEFCDVVSKIHIHTQDEVEKMTIGMMINDDSQSCLEQAPVMVEASKSSSVGQPDSSPTVVRM

SEQ ID NO: 31667 - protein, 65 aa, Glycine max
  unsure (1)..(65): unsure at all Xaa locations
  Clone ID: TF_uC-gmflminsoy007a12b1.pep
PWEKMVESCKRLXIMNGTEAMGMAPRAKEICKSRKLKRSQIQCTMKYRTKEDAIKIYIYIYMKHF

SEQ ID NO: 31668 - protein, 361 aa, Glycine max
  Clone ID: TF_GmC371_3.pep
MSPPVLSIGEEEGKSNVTLLVSSSTTMESVCLKSLEFKERNYMGLSDCSSVDSSVPSFSEETKSNLNLKATELRLGLPGSQSPDRDSDLCLRSSTQFDEKTLFPLRPLTDDHHSSAKTAVLGNKRGFSDAMNGFSSEGKFLVDSEAANPILSPRPASNLGLKPGSTLEKVGVQQTKMKEVATTKANEARPTIDGSANNNNSAPATKAQVVGWPPIRSFRKNSLATTSKNNEEVDGKVGVGALFVKVSMDGAPYLRKVDLKNYSTYPELSSALEKMFSCFTMSKCGSHGILGREMLNETKLKDLLHGSEYVLTYEDREGDWMLVGDVPWEMFIETCKRLRIMKSSDAIGLAPRAVEKCKSRT

SEQ ID NO: 31669 - protein, 231 aa, Glycine max
  Clone ID: TF_GmC22_2.pep
MINFEETELRLGLPGGSASDHNESTTVKGSGGKRGFSETASVDLKLNLSSSDDSASDSPSSASTEKTTTAAPPPPSRANDPAKPPAKAQVVGWPPVRSFRKNIVQRNKNEEEAAFVKVSMDGAPYLRKVDIKLYKSYQELSDALAKMFSSFTIEKCGSQGMKDFMNETKLIDLLNGSDYVPTYQDKDGDWMLVGDVPWEMFVESCQRLRIMKGSEAIGLAPRAVEKCKNRS

SEQ ID NO: 31670 - protein, 526 aa, Glycine max
  Clone ID: TF_GmC371_1.pep
MVARRKKSNTSYGSAATGSGSGSGSGGGYNTVQPSPPTTDQVQASAQTPENRKASPTVQKKADTSIVGKPFDDIKKYYSIGKELGRGQFGITYLCTENSSGGTYACKSILKRKLVSKADREDMKREIQIMQHLSGQPNIVEFKGAFEDRFSVHLVMELCSGGELFDRIIAQGHYSERAAASLCRSIVNVVHICHFMGVMHRDLKPENFLLSTKDDHATLKATDFGLSVFIEQGKVYHDMVGSAYYVAPEVLRRSYGKEIDIWSAGIILYILLSGVPPFWAETEKGIFNAILEGEIDFVSEPWPSISDSAKDLVRKMLTQDPNKRITSSQVLEHPWMREGGDASDKPIDSAVLSRMKQFRAMNKLKKLALKVIAENLSEEEIKGLKAMFANMDTDNSGTITYEELKTGLARIGSKLSEAEVKQLMDAADVDGNGSIDYLEFISATMRPHRLERDEHLYKAFQYFDKDNSGYITRDELEIAMTQNGMGDEATIKEIISEVDADNDGRINYEEFCAMMRSGMPHQGQLL

SEQ ID NO: 31671 - protein, 177 aa, Glycine max
  Clone ID: TF_GmC39872_1.pep
MGKASSSSSSSISSCRNPSNSTASSLTHQHSQDHLRTDLRLGLSLSATQHVGSSSSGGHWQPMQPHLISSFSQATEVNDCSDHTSFFVKVYMEGIPIGRKLNLLAHDGYHELVKTLEQMFDTTILWGTEMDGVQPERCHVLTYEDGEGDLIMVGDVPWEMFLSAVKRLKITRVEAFG

SEQ ID NO: 31672 - protein, 282 aa, Glycine max
  Clone ID: TF_GmC435_2.pep
MNERSRDEASPQLLDLISNEREWQMNKRNEGKSSEERKLELRLGPPGEDWSLGGKMKNNNTEREDQSLLSLGCFSPNINMFSPSSANTAVSQPNTSQKRTAPAPVVGWPPIRSFRKNLSSSSSASKPPPPPESQAEQQHNKVAGKKPVDNYANNKGLFVKINMDGVPIGRKVDLNAYDSYENLSSAVDELFRGLLAAQRDSSAGGVHNKQEEEKAITGLLDGSGEYTLVYEDNEGDRMLVGDVPWHMFVSTVKRLRVLKSSELSAFTLGSKQDKIPLDSAMK

SEQ ID NO: 31673 - protein, 183 aa, Glycine max
  Clone ID: TF_GmC11115_1.pep
MSSQSDAVGCNLKETELTLGLPGTKTNGTKRGFSDTLNTSHNKMLRPTSKEQVVGWPPVRASRKNAMKMSCKLVKVAVDGAPYLRKVDLEMYETYEHLMRELETMFCGLAIRNHLMNERKLMESGNGIEYMPTYEDKDGDWMLVGDVPWKMFVESCKRIRLMISSEAVGLGPRSTSSKCTGST

SEQ ID NO: 31674 - protein, 192 aa, Glycine max
  Clone ID: TF_GmC960_1.pep
MESTVTFETDLNLKATELRLGLPGTEEIVEKPLPASARITNKRPLSETSEECASKGSSAPHVETEAAPPAKAKIVGWPPIRSYRKNSLQENDGAGIYVKVSMDGAPYLRKIDLKVYGGYTQLLKALENMFKLTIGEYSEKEGYKGSDYAPTYEDKDGDWMLVGDVPWDMFVTSCKRLRIMKGSEARGLGCAV

SEQ ID NO: 31675 - protein, 253 aa, Glycine max
  Clone ID: TF_GmC870_2.pep
NTSISYNPQSLLFRDNNQDGEVQADARSNIPYANNIDSQMGMPLNPDSLSTKGTLRLGKDLSNNFSSEGMLGNYEINRDAQQEPSSSMVSQTFGVPDMAFNSIDSTIDDSNFLNSGPWAPPPAPPLPPLPPLPPAQFQRMRTYTKVYKRGAVGRSIDITRYSGYEELKQDLARRFGIEGQLEDRQRIGWKLVYVDHESDVLLLGDDPWEEFVNCVRCIKILSPQEVQQMSLDGDFGNGGLPNQACSSSDGGDT

SEQ ID NO: 31676 - protein, 177 aa, Glycine max
  Clone ID: TF_GmC31466_1.pep
MGKPASSSSSSISSTTNRHLLLSTASSLTQELPTDLRLGLGISATQHFASSISRGQWQQSHHPFVNIYSQVPAEVNDCSNDHSSFFVKVYMEGIPIGRKLNILAHGGYYELVRTLEHMFDTTILWGTEMNGVQPERCHVLTYEDEEGDLVMVGDVPWEMFLSTVKRLKITRVDTFGC

SEQ ID NO: 31677 - protein, 291 aa, Glycine max
  Clone ID: TF_GmC6795_1.pep
MSTVSKDDNLVLSSEDSSCPEESELELGLGLSLSSGPSSKSHHHHVHAPTTLYARIYTAKDFPSSAAAASSSPSSSSSSSPNITAGTKRAAADSLVANNRPSQVVGWPPLRTYRVNSFNSHAKSTEVFNSVAEKSKINNTVVRKTNDNDNDNNINAKEKRHLRSSLFVKVNMDGIPIGRKVDLSAHSSYETLAQTLEDMFNESTTVTTCKGSNGEDYGIIIGGERHSKLLDGSSKFVLTYEDKEGDWMLVGDVPWGMFLSSVRRLRIMRTSEANGLAPRLEENIKQRCKPI

SEQ ID NO: 31678 - protein, 173 aa, Glycine max
  unsure (1)..(173): unsure at all Xaa locations
  Clone ID: TF_uC-gmroLIB3259P148e08a1.pep
SAPTLLDTQGPYHTYPSLSHVLWRQSVTLYKKINLEETELRLSLPLRGNDTLKNTSSTGKKVFSDTAVDMKHNLSXTSYNAYCDLTKEKNTTAGGPSDNDPXKPPAKAHAAGWPPLRPFRKNIVHRSHSNDGEXSATSSICNANTGAPIENVSMHGAPYIRKVDWKTYKSYQE

SEQ ID NO: 31679 - protein, 126 aa, Glycine max
  Clone ID: TF_GmC382908_1.pep
KSGVGCLYVKVSMDGAPYLRKVDLKTYSNYIELSSALEKMFSCFTIGQCNSRALPGKDGLSESAFRDLVDGSEYVLTYEDKEGDWMLVGDVPWKMFTESCKKLRIMKGSEAIGLAPRGMEKFRSQY

SEQ ID NO: 31680 - protein, 41 aa, Glycine max
  Clone ID: TF_LIB4280-048-Q1-N1-E10.pep
KGDWKLVGDVPWGMFFLPCQRLGVFKSFYPLGLAPRGVLKC

SEQ ID NO: 31681 - protein, 92 aa, Glycine max
  Clone ID: TF_GmC573_6.pep
VRCTCHANLRKIDLNVYKSYPELLKALGNMFKCTFGEYSEREGYNGSEYAPTYEDKDGDWMLVGDVPWNMFVSSCKRLRIMKASEAKGLGCF

SEQ ID NO: 31682 - protein, 372 aa, Glycine max
  unsure (1)..(372): unsure at all Xaa locations
  Clone ID: TF_GmC183_1.pep
MSPPTLVTEEEGRSTVASDSSQSLDCFSQNGAGLKERNYLGLSDCSSVDSCASTVPSLCDEKKENMNLKATELRLGLPGFQSPEREPDLFSLSSPKLDEKPLFPLLPTKDGICSSGQKAVVSGNKRGFADTMDGFSQGKFAGNTGMNAVLSPRPSGAQPSAMKETPSKLSERPXCSTNNGTGHNHTGASISGSAPXASKAQVVGWPXHIRSFRKNSMATTTNKNNDEVDGKXPGAGALFVKVSMDGAPYLRKVXDLRNYTXTYQELSSALEKMFLSCFTLGQCGSRSSKGREMLSEXSKLKDLLHGSEYVXLTYEDKDGDWMLVXWDMFIDTCKRLKIMKGSDAIGLSSMARDINMNRCYLVLYPEEGWKEN

SEQ ID NO: 31683 - protein, 351 aa, Glycine max
  unsure (1)..(351): unsure at all Xaa locations
  Clone ID: TF_GmC1825_1.pep
MESRVLSRAGTLSSLPHLRKPPREAVSSASLVAVKAGIPGSTHASKQTRTHDKQTKQHYDRKGTQSEREGSYRNKEKNFQRGESKRVLLFLFYIYLGAKLCEFIDKPEMATMLTKEHGLNLKETELCLGLPGGGGGGGGGGEVETPRATGKRGFSETVDLKLNLHSKEDLNENLKNVSKEKTLLKDPAKPPAKAQVVGWTPVKXYRKNMMAVQKVSTEDVAEKTTSSTANSGXLSKVSMDGAPYLRKVDLXMYKSYXELSDALAXKMFSSFTMGNYGAQGMIDFMNESKLMDLLNSSEYVPSYEDKDGDWMLVGDVPWEMFVESCKRLRIMKGSEAIGLAPRAMEKCKSRS

SEQ ID NO: 31684 - protein, 211 aa, Glycine max
  Clone ID: TF_GmC573_8.pep
FAIVQVIYQEIDNSMGKYEKELNLEATELRLGLPGSDEPGKRSIVRSNKRSSTEASEEECISKGNMNSNGSDITSDDQDNLVPPAKAQVVGWPPVRSYRKNTLQQKKEEQGEGSGMYVKVSMAGAPYLRKIDLNVYKSYPELLKALGNMFKCTFGEYSEREGYNGSEYAPTYEDKDGDWMLVGDVPWNMFVSSCKRLRIMKASEAKGLGCF

SEQ ID NO: 31685 - protein, 263 aa, Glycine max
  Clone ID: TF_GmC22_3.pep
TQLIKHTRTITYLYLNITSLMEAERDKYKMINFEETELRLGLPLSGNETLKTTCSTGKRVFSDTAVDLKLNLSSTSNSASSDLTKEKNITAAAPPANDPAKPPAKAQVVGWPPVRSFRKNIVQRSNNNEGEKAATSSSNNVNTGAAFVKVSMDGAPYLRKVDLKLYKSYQELLDALAKMFSSFTIDKCGSQGMKDFMNESKLIDLLNGSDYVPTYEDKDADWMLVGDVPWEMFVESCKRLRIMKGSEAIGLAPRAVEKCKNRS

SEQ ID NO: 31686 - protein, 255 aa, Glycine max
  Clone ID: TF_GmC2301_7.pep
MANQNQRECAECLTWLCFLLITLSLSFFLFCFKVASVVCIYKEPKVAAFLFSLDQFHSLEDMGTLEQIDAPQTQSSSSSSSSIDSNNNPSRTRTPPSSSPSSSLCRNRTDLSTDLRLGLSISPSSQSESPFNSTRREESFDWPPIKSILRSTLVGKQSYLNQRPSLFVKVYMEGIPIGRKLNLMAHYGYDGLVKTLGHMFRTNILCPNSQPLNSGNFHVLTYEDQEGDWMMVGDVPWEMFLNSVRRLKITRADRC

SEQ ID NO: 31687 - protein, 71 aa, Glycine max
  Clone ID: TF_LIB4391-021-R1-N1-H2.pep
WMLVGNVPWDMFVTSFKRLKIIKGSKARGLGFSVLKNPTPKNFFEQRIKKSVLGVKGKTCLKTCVFGFKRF

SEQ ID NO: 31688 - protein, 147 aa, Glycine max
  Clone ID: TF_GmC26770_2.pep
TKIPPRVRTAERRTQKGKNGDEENHLVGWPPVKSWRRKELHQQHPARGRIRNDRIQANENQSRGPNSLYVKVNMEGVAIGRKINLRLFNSYQTLTSSLISMFAKYQKFEEVGESYTLTFQNEQDEWLQVGHVPWQSFIGTVRRLVIL

SEQ ID NO: 31689 - protein, 126 aa, Glycine max
  Clone ID: TF_GmC613_2.pep
GSRVYKSGSFGRSLDITKFTSYPELRSELARMFGLEGELEDPVRSGWQLVFVDQENDVLLLGDGPWPEFVNSVGYIKILSPQEVQQMGNNELELLNSVPIQRLSNGVCEDPRNLSTGITTVGSLNY

SEQ ID NO: 31690 - protein, 242 aa, Glycine max
  unsure (1)..(242): unsure at all Xaa locations
  Clone ID: TF_GmC435_1.pep
MWQRSHKSSEERKLELRLGPPGEESLNESIRKSNRERNESQFTLGCFSTQNFFTSDKQGPAVSKRTSSGPAVGWPPIRSFRKNIASGSTSKLPSGSHQQHQNVVPYKVASQKPTDKSGKGLFVKINMDGVPIGRKVDINAYDSYEKLSSAVDELFRGLLAEMKLSHIGSSQCXKAITGLLDGSGEFTLVYEDNEGDRMLVGDVPWHMFVSTVKRLRVLKSSELSAFTLGSKQDKIPLDSAMK

SEQ ID NO: 31691 - protein, 246 aa, Glycine max
  Clone ID: TF_GmC1199_2.pep
MVFEETELRLGLGLCLPGNGTTATTEAAAAELGVRKRGFSETETDETATVDLMLNLSPKEAAAADGADPREKPKTSPKEKTLLLPDPAKPPAKAQVVGWPPVRSFRKNMFAAQKSSGGEESEKSSPNASFVKVSMDGAPYLRKVDLKMYKSYPELSDALGKMFSSFTIGNCESQGFKDFMNESKLMDLLNSSDYVPTYEDRDGDWMLVGDVPWEMFVESCKRLRIMKGKEAIGLAPRAVEKCKNRS

SEQ ID NO: 31692 - protein, 174 aa, Glycine max
  Clone ID: TF_GmC870_3.pep
IRLEKGVPPEISSSMVSQTFEVPDMSFNSIDSTIDGSGFLNRGPWDLPPPPPPQQQQVQRIRTYTKVYKRGAVGRSIDITRYSGYEDLKQDLALRFGIEGQLEDLQRIGWKLVYVDHENDVLLVGDDPWEEFVNCVRCIKILSPQEVQQMSLDGDFGNGGLPYPAGSSSDGGNA

SEQ ID NO: 31693 - protein, 533 aa, Glycine max
  Clone ID: TF_GmC570_2.pep
GSSSGSIPPQQSFQSPNKNALLMTSLPQDSQFQQQIDQQASLLQRQQQQQTQLQSSPLQLLQQSLSQRASQQPQMTQMCQQNSSEQQPQLQMLQKLQQQQQQQQQQQQQQLLSTSSPLLQSQLLQQQNTHQQNQQFPQLPLSQGHQPQQLGNNAFSMEKLLNGNNYSTSSLMQTQQLSVNQPHNTQKSLTNTRAPSTLTDGDAPSCSTSPSTNNCQISPNLMKRNQHVPATLGGPSVLEPTNHLMQGLHSKSEMQIKHELPSVRGTDQLKFKGTVADQMEASSGTSYCIDPNNIHQNFPLPNFCMDGDVQSNPRNNLPFASNLDGLTPDTFLSRGYDSQKDLQNLLSNYGGAPRDIETELSTAALSPQPFGVPGIPFKPGCSSDIAINDPGVLNNGLWANQTQRMRTYTKVQKCGSVGRCIDVTRYKGYDELRHDLARMFGIEGQLEDPQRTEWKLVYVDHENDILLVGDDPWEEFVSCVQSIKILSSAEVQKMSLDGDLGHVPVPNQACSGTDNGNAWRGQYEDNSAASFNR

SEQ ID NO: 31694 - protein, 189 aa, Glycine max
  Clone ID: TF_GmC11115_2.pep
MSSESHAVDCNLKETELTLGLPGTKTTATKRGFSDTLPPSQNKILRPTSKFPTPNREQLVGWPPVRASRKNAMKSCCKLVKVAVDGAPYLRKVDLDMYDSYEHLMRELETMFCGLAIRNHLMNERKLMDPGNGIEYMPTYEDKDGDWMLVGDVPWKMFVESCKRIRLMISSEAVGLGPRSTSSKCTGST

SEQ ID NO: 31695 - protein, 204 aa, Glycine max
  Clone ID: TF_GmC573_12.pep
MGSFETELNLKATELRLGLPGCDETHDKSSSSSGSVVRSNKRSSPEPSVEESRCNSNGSSDSTTTSDHDEDSVQPAKVQVVGWPPIRSFRKNSLQQQKKVEQQGDGSGTYLKVSMAGAPYLRKIDLKVYNSYPELLMALQNLFKCTFGEYSEREGYNGSEYAPTYEDKDGDWMLVGDVPWNMFVSSCKRLKIIKGSEAKGLGCL

SEQ ID NO: 31696 - protein, 204 aa, Glycine max; identical to SEQ ID NO: 31695
  Clone ID: TF_GmC573_4.pep

SEQ ID NO: 31697 - protein, 114 aa, Glycine max
  Clone ID: TF_GmC183_5.pep
MDGAPYLRKVDLPNYTTYRELSSALEKMFSCFTLGQCGSHGAPGREMLSESKLKDLLHGSEYVLTYEDKDGDWMLVGDVPWDMFIDTCKRLKIMKGSDAIGLAPRAMEKSRSRC

SEQ ID NO: 31698 - protein, 206 aa, Glycine max
  Clone ID: TF_GmC573_9.pep
MGSFETELMNLKATELRLGLPGCDETNEKSSSSSGSVVRSNKRSSPEPSVEESRCNSNGSSDSTTTSDHDQDSAQPEKVQVVGWPPIRSFRKNSLQQQKKVEQLQGDGGGMYVKVSMAGAPYLRKIDLKVYNSYPELLAALQSLFTCTFGEYSEREGYNGSEYAPTYEDKDGDWMLVGDVPWNMFVSSCKRLKIIKGSEAKGLGCL

SEQ ID NO: 31699 - protein, 169 aa, Glycine max
  Clone ID: TF_GmC166_2.pep
VVLVKRRAISFYLPLLHPVEKNQSRIHRKNSMASQPLKNDTDAEAKSGCLYVKVSMEGAPYLRKVDLNSFTTYKDLSLALEKMFSCFTLSQCGSYGVSSRENLSESRLMDLLHGSEYVLTYEDKDGDWMLVGDVPWEMFTESCKRLRIMKSFEAIGLAPRAMEKCKSRN

SEQ ID NO: 31700 - protein, 64 aa, Glycine max
  Clone ID: TF_uC-gmflLIB3275P149e01a1.pep
ESAPVLFSLCPGLGPRDSRACSPILWISSGESILIYHTLLTNDLQKGYAGNPRTKKKQTNVSKT

SEQ ID NO: 31701 - protein, 81 aa, Glycine max
  Clone ID: TF_GmC166_4.pep
SGQCGSYGVSSRENLSESRLMDLLHGSEYVLTYEDKDGDWMLVGDVPWEMFTESCKRLRIMKSFEAIGLAPRAMEKCKSRN

SEQ ID NO: 31702 - protein, 195 aa, Glycine max
  Clone ID: TF_GmC590_1.pep
MAKEGLGLEITELRLGLPDAEHQVSVVNKKNEKKRAFSEIDDGVGDENSSSGGGDRKMETNKSQVVGWPPVCSYRKKNSMNEGASKMYVKVSMDGAPFLRKIDLGLHKGYSDLALALDKLFGCYGMVEALKNADNSEHVPIYEDKDGDWMLVGDVPWEMFMESCKRLRIMKKSDAKGFGLQPKGSLKGFIESAAK

SEQ ID NO: 31703 - protein, 133 aa, Glycine max
  Clone ID: TF_GmC1129_2.pep
QVHKSGSFGRSLDISKFSSYDELISELARMFGLEGQLEDPKTQRSGWQLVFVDRENDVLLLGDDPWQEFVNNVWYIKILSPLEVQQMGKVLSPSTSAPGDKLSTPVNSCDNYVSQQELRSSRNGMASMGSFHY

SEQ ID NO: 31704 - protein, 58 aa, Glycine max
  Clone ID: TF_jC-gmXLIB3563P059be05d1.pep
TNCNPLLLNNILPQYLIVQLFANIQARHSVNTSKTTFNPNYADRVQYESHAYLTYTKV

SEQ ID NO: 31705 - protein, 94 aa, Glycine max
  Clone ID: TF_jC-gmro02910066g04a1.pep
ARATLDGYDQLVDELEKMFDIKGQLQHRNKWETVFTDDEGDMMLVGDDPWPEFCNMVKRIFICSSQDVHKLSSGSKLPISSMGEIVISLNTTET

SEQ ID NO: 31706 - protein, 110 aa, Glycine max
  Clone ID: TF_GmC590_2.pep
KMYVKVSMDGAPLPVRIPGSTHASDSELVLALEKFFGCYGIREALKDAENAEHVPIYEDKDGDWMLVGDVPWEMFIESCKRLRIMKRSDAKGFDLQPKGSLKGFIEGVTK

SEQ ID NO: 31707 - protein, 272 aa, Glycine max
  unsure (1)..(272): unsure at all Xaa locations
  Clone ID: TF_GmC613_1.pep
EQSGKRLAIEPRNATASSPFALPEGAREGRPQTPNAQNGSALPPFPGREWTIEGSNDPQIHRWFXSHIEPSSLLMHNGMSSLKGVSSNSDSPTIPFQSSNYLNTTVPDSSLNPGMTHNIGESGFLQTPENGGQGNPTNKTFVKVYKSGSFGRSLDITKFTSYPELRSELARMFGLEGELEDPVRSGWQLVFVDQENDVLLLGDGPWPEFVNSVGCIKILSPQEVQQMGNNGLELLNSVPIQRLSNGVCDDYAGREDPRNLSTGITIVGSLNY

SEQ ID NO: 31708 - protein, 290 aa, Glycine max
  Clone ID: TF_GmC519_2.pep
MAQKNVLAESKRNDSTGTWHHMQTDMNSKSNSGNAMLRNQTEGSWLSSPHSSCPSHLFQDATDDSKSVSAWPVSKPHSSRLNNDHVLDQVDKESKVETATSYRLFGIDLIDHSRNSPSVEKASAQAGNAPKVTTEGCTSTLTRTDAGHLSDVPMASSKERKQEQQQVSPKETQSKQICRSRTKVQMQGVAVGRAVDLTMLDGYDQLINELEEMFDIKAQLQHRNKWEIVFTDDEGDMMLVGDDPWPEFCNMVRRIFICSSQDVKKMSCGSKLPISSVEDGTVISSDTTET

SEQ ID NO: 31709 - protein, 166 aa, Glycine max
  Clone ID: TF_GmC630_3.pep
NYATSVADERSVVRSLDHEKVLQTSQTHLKDIQAKSHSGSARSCTKVHKKGIALGRSVDLTKFSDYGELIAELDQLFEFGGLLTSPQKDWLIVYTDNEGDMMLVGDDPWQEFVAMVRKIYIYPKEEIQKMSPGTLSSKNEENQSASEGATDTQEIKCQLNNSASDT

SEQ ID NO: 31710 - protein, 213 aa, Glycine max
  Clone ID: TF_GmC1600_1.pep
MTTLLLRILHLTLNFLSPYAPANSSFTSLPITAPSQVVGWPPLGAYRMNSYNSHAKSPATEVFNSTLDKRASNSAGVRKSADGGSDSSNIISKEKGNLRTSLFVKVKMDGIPIGRKVDLGAHDSYETLAQTLEDMFDESTTVLTHKVGSNGEDHGTEVGTDGHSKLLDGSSDFVLTYEDKEGDWVLVGDVPWCYFAAPRLEEKNRRSNTSSYR

SEQ ID NO: 31711 - protein, 244 aa, Glycine max
  Clone ID: TF_GmC1199_3.pep
MVFEETELRLGLRLGLPGNGAAPTTEAAAELGVRKRGFSETETDETTSVDLMLNLSPKEASAAATTDGADPRENPKTSPKEKNLPLLDPAKPPAKAQVVGWPPVRSFRKNMFAAQKSSGGEESEKNSPNASFVKVSMDGAPYLRKVDLKMYKSYPELSDALGKMFSSFTIGNCESQGFKDFMNESKLMDLLNSSDYVPTYEDRDGDWMLVGDVPWEMFVESCKRLRIMKGKEAFGLAPRTGEKC

SEQ ID NO: 31712 - protein, 213 aa, Glycine max
  Clone ID: TF_GmC630_8.pep
SRELMSKQVSAKTCEAVKPKDGDCKLFGFSLISGPTLPEPSLSQRNVSEAADQMHLTAHQQRTSENDEKLDHSKGSRPVDDIVVDDQDRPLRTSQLHTKDVQAKPLSGSARSCTKVHKKGIALGRSVDLTKYSGYDELVAELDQLFEFGGELLSTKKDWLIVFTDNEGDMMLVGDDPWQEFCAMVRKIYIYPKEEIQKMSPGTLSSKNEENHS

SEQ ID NO: 31713 - protein, 557 aa, Glycine max
  Clone ID: TF_GmC1105_1.pep
MDFTQDLHCLLSEQRRKLAAAEAMELDLDFAFRLQLKEALAASLAAQPSSSSAAAAAIIEQPVVVIHDDDVNAMTLQREELARMEREMKDREQSEAETLKMREELCRRIHDEKVAREISAIPEKDWQQWGDNFEKPFGEGSSSSSLSREEGVVRVYFKGLVSEENVRGRKVVLSGIGVAICDLSDNLIFEVSKSLIGNGTSKVAAEIKALIEAFNAAIALDLKRVVYCCDYYPLFQFVSGKWPAKQRKIAILVDQVNLLQRKFSYCNPRFVARHDVKFAFKLARDAIESQSTRLAESGSRSLNETCVICLEETDVGQIFSVDGCQHRYCFSCMKQHVEVKLLHGMVPKCPHQGCKYELLVDSCQKFLTQKLTETMQQRKLEASIPVAEKIYCPYPTCSALMSKTEVLEYSKDITGQSEQSEPKICLKCRGLFCFNCKVPWHSGMTCNTYKRMNPIPPAEDLKLKFLASRSLWQQCLKCNHMIELAEGCYHMTCRCGYEFCYNCGAEWKDKKATCACPLWAEENIWLDDHEEELEEEEEDDDDDYDDYRSDYPDDYYY

SEQ ID NO: 31714 - protein, 101 aa, Glycine max
  Clone ID: TF_LIB4390-059-R1-K1-G3.pep
IEENNIREAECPNCRRLFCAQCRVPWHDNMPCEDFQKLNADERDKEDIMLMNLANQMQWKRCPRCRFYVAKSDGCMYMKCRGKTQKQLLLLIHYRKVASVY

SEQ ID NO: 31715 - protein, 1421 aa, Glycine max
  Clone ID: TF_GmC23542_1.pep
MVQRERVQEESIGCYEGQSIKCCSTFSSSREFDSRIAFMTDHCLLQHYMSDNNLSGVSCIIIDEAHERSLNTDLLLTLLKSLLCRRVEMRLIIMSATADAKQLSDYFFACGIFRVLGRSFPVDIKYVPSDYAGDSGSAVVASYVSDVVRMATEVHKTEKEGTILAFLTSQIEVEWACEKFQAPSAVALPLHGKLSSDEQFRVFQNYTGKRKVIFSTNLAETSLTIPGVRYVIDSGLVKDSRFDPGSGMNVLKVCWISQSSADQRAGRAGRTEPGVCYRLYTEADYQSMDLNQEPEIRRVHLGVAVLRILALGVKDVQGFDFVDAPSPSSIDMAIRNLIQLGAIELNNDVHDLTSEGWCLVRMGIEPRLGKLILGCFKHGLGREGIILAAVMANASSIFCRVGNEFDKQRSDCLKVQFCHCDGDLFTLLSVYKEWEALPRERKNKWCWENSINAKSMRRCQDTILELETCLEREHDVVTPSYWRWDPCMPSNHDKNLKRVILFSLAENVAMYSGCNQLGYEVAQTGQHVQLHPSCSLLVFAQKPSWVVFGELLSISNQYLVCVSAFDFQSLYDLCPAPLFDVSKMEERKLLMKTLSGLGCILLKRFCGKANCNLLALVSRIRKACMDERIFIEVNVDNNEIHLYASSNDMDIALGLVNDVLEYERKWLRTECMDKFLYHGSGFSPPVALFGSGAEIKHLELEKRSLSVDVCHPNINEIDDKELLMFFEKNTSGCICAVHKFTGNTRDEDRDKWGRITFMSPDIVRRAAELDGREFCGSSLKVVPSQLGGDKTFSFPAVKARISWPRRLSRGFAIVKCDIKDVDYILRDFYNLAVGGRYVRCEVGKKSMDSVVINGLDKELSEAEISDVLRTATTRRILDFFLVRGEAVGNPPCSALEEALLKEIYPFLPKRNPHISPCRVQVFAPEPKDAFMRALITFDGRLHLEAAKALEQIEGKVLPGCLSWQKIKCQQLFHSSLTFPTPVYRVIKEQLDEVLASFRNLKGLECNLDRTFNGSHRVKITANATRTVAEVRRPLEELLRGKTIEHDSLTPVVLQLMLSRDGFSLKNSLQQETGTYILFDRHNLNLRVFGSPNMVALAQEKVIQSLLSLHEEKQLEIHLRGRDLPPDLMKQMIKNFGPDLHGLKERVPGVDLTLNIRRHIIILHGSKELKPRVEEIVFEIARSSHHLVERFGNGPSCPICLCEVEDGYRLEGCGHLFCRMCLVEQFESAIKNQGTFPVCCTHRDCGDPILLTDLRSLLFGDKLEDLFRASLGAFVATSGGTYRFCPSPDCPSIYRVADPGSAGEPFVCRACYSETCTRCHLEYHPYLSCERYKEFKEDPDSSLIEWCRGKEQVKCCSACGYVIEKVDGCNHVECKCGKHVCWVVTFLLCKLYIMCSKAVQYGCIYPLNEPEERIDYKSISTN

SEQ ID NO: 31716 - protein, 163 aa, Glycine max
  Clone ID: TF_GmC136999_1.pep
PALRPLAAASSAPPTPRPLTTTIWAHQTTRTCNTVSPTSPNRLKCLQTFAQIHVKEGTVSNLKCPEAKCAIMIPSGLLKQLLDDTDYERWESMMLEKTLASMSDVVYCPRCETPCIEDEDQHAQCPKCYFSFCTLCRERRHVGIACMSLDMKLQILQVWYLNP

SEQ ID NO: 31717 - protein, 214 aa, Glycine max
  Clone ID: TF_GmC23542_3.pep
NGPSCPFCLCEVRDGYRLEGCGHLFCRLCLVEQFESAINNQGTFPVCCTHRDCGDPILLTDLRSLLFGDKLEDLFRASLGAFVATSGGAYRFCPPPDCPSIYRVADPESAGEPFVCGACYSETCTRCHLEYHPYLSCERYQEFKEDPDSSLKEWCRGKEQVKCCSACGYVIEKVDGCNHVECKCGKHVCWVCLEFFSTSNDCYDHLRTIHLTII

SEQ ID NO: 31718 - protein, 405 aa, Glycine max
  Clone ID: TF_GmC43002_1.pep
IRLEATQNKIRRVFAFTDSELLHDQITFGKKLEMPLLTALRERILELANNFEDFVLNLIPSTDLEQPLHLAKVAIGLVTFPVNGEILLKNCSICCDDKPVPIMITLKCLHTFCSHCLRAYADGKVQSCQFPIRCPQPRCKYCMSVTECRSFLPFISFGSLEKALSEENIDHSDRIYCPFPNCSVLLDPHECSSARASSSSQSDNSCIECPVCRRFICVDCKVPWHSSMSCLEYQNLPEKERDVSDITLHRLAQNKRWKRCQQCRRMIELTQGCYHMTCWCGYEFCYSCGAEYREGQQTCQCAYWDEDNSEDSVAHSLQESEQWAWETFNSLSMIVDAYSDQERSQLALIQRFLAGGFSLSDHNPYQSPPRCTDSYVDPMKDLHQLPWLERFVSVISDNYYDDYIQ

SEQ ID NO: 31719 - protein, 541 aa, Glycine max
  unsure (1)..(541): unsure at all Xaa locations
  Clone ID: TF_GmC1406_1.pep
MDVYASSDEDYHYDSDHEDSVEAYENDENYALLSSKGTTTKVITKESLLAAQKEDLRRVMDMLSVREQHARTLLIFHRWDVENLFEVLVDKGKSFLFAEAGVSVDEHRNSDSPVPPAFMCYICMEEVPSSKTTRMDCGDXFCNISWIEHFIVKINEGQSKRIRCMEHKCNSICDDALVRTLLSREHPHMAEKYERFLLESYIEDNKRVKWCPSTPHCGNAIRVEDDELCEVECSCGVQFCFSCLSEAHSPCSCLMWELWAKKCRDESETVNWITVHTKPCPKCHKPVEKNGGCNLVSCICGQAFCWLCGGATGREHTWSSIAGHSCGRYKEQEKTAERAKRDLYRYMHYHNRYKAHTDSFKIESKLKETIQGKIAISEEKDSTLRDYSWVNNGLSRLFRSRRVLSYSYAFAFYMFGDELFKDEMTDAQREIKQNLFEDQQQQLEANVEKLSKILEEPFETFSDDKVVEIRMQILNLSTIIDKLCQKMYECIENDLLGSLNLGIHSIAPYKSKGIERASELSVGWNNGVNNTGKCLLGGLFE

SEQ ID NO: 31720 - protein, 583 aa, Glycine max
  unsure (1)..(583): unsure at all Xaa locations
  Clone ID: TF_GmC6405_2.pep
MESEDDMHDANDIESLDDDFYSGETEDAPLDYYSDDDADDYFDDAERIESRRPEQNFTILKESDIRLRQEDDVARVATVLSISRVSASLLLRHHNWSVSRVHDTWFADEERVRKAVGLLEKPIVQHPNARELTCGICFENYPRARIEMASCGHPYRISCWEGYISTSINDGPGCLMLSPDPXCGAATGRSSRFGSRSDEDKQKYARYLLRSYIEDNKKSKWCPAPGCEYAVTFDAGSTGNYDVSCLCSYGFCWNCTEEAHRPVDCGTVAKWILKNSAESENMNWILANSKPCPKCKRPIEKNHGCMHMTCTPPCKFEFCWLCVGAWSDHGERTGGFYACNRYEAAKQEGVYDDTERRREMAKNSLERYTHYYERAFSCXSRQKALADLQQMQTVHIEKLSDIQCQPESQLKFITEAXTKIECRRVLKWTYAYGFYLPEHEHAKKQFFEYLQGEAESGLERLHQCAEKELQPFLSADDPSREFNDFRTKLAGLTSVTRNYFENLVRALENGLSDVGSNGAAFSKATSSKNAAGSSKGRAGRGKGTFRTSLSSKLNDDSHWYCEHCTYANVKSASTCQMCYQQRR

SEQ ID NO: 31721 - protein, 333 aa, Glycine max
  Clone ID: TF_GmC215703_1.pep
MLNPEPPPPPPPMMVPPATPMNRETTSLRKKNRLRTRTRIPPFDVDSSFFTTPISLQGTTKSNAISVEQYDGVSASASSPVHVINLSDTEDDDEVRILNFTPINTSFGKRSKKSSSKGECSNSASFVCEICTETKTARDSFSIIGCHHVYCNSCVAQYVESKLEENIVSIPCPVPGCRGLLEADDCREILAPRVFDRWGKALCEAVIAAEEKFYCPFADCSVMLIRGIEENNIREAECPNCRRLFCAQCRVPWHDNMPCEDFQKLNADERDKEDIMLMNLANQMQWKRCPRCRFYVPKSDGCMYMKCRCGNAFCYNCGAPNLTSSHSCSYCFR

SEQ ID NO: 31722 - protein, 266 aa, Glycine max
  Clone ID: TF_LIB4203-002-R1-K1-F3.pep
LIWINKEEMIFQIPWKHAAKHGWDINKDACLFRSWAIHTGRYKAGEKEPDPKTWKANFRCAMNSLPDIEEVKDQSRNKGSSAVRVYRMLPPLTRNQRKERKSKSSRDTKSKTKRKLCGDVSPDTFSDGLSSSTLPDDHSSYTTQGYLGQDLDMERDITPALSPCVVSSSLSEWHMQMDIIPDSTTDLYNLQVSPMPSTSEAATDEDEEGKIAEDLMKLFEQSEWQPTHIDGKGYLLNEPGTQLSSVYGDFSCKEEPEIDSPRGDIG

SEQ ID NO: 31723 - protein, 171 aa, Glycine max
  unsure (1)..(171): unsure at all Xaa locations
  Clone ID: TF_LIB4167-057-R1-K1-E4.pep
MEDPNQAQEGSSQKKMGRGKIEIKRIENTTNRQVTFCKRRNGLLKKAYELSVLCDAEVALVVFSTRGRLYEYANNSVRATIERYKKANAAASNAESVSEANTQFYQQESSKLRRQIRDIQNLNRHILGEALGSLSLKELKNLEGRXLEKGLSRVRSRKEIVLQNHNNYLGA

SEQ ID NO: 31724 - protein, 206 aa, Glycine max
  Clone ID: TF_GmC1907_2.pep
MVRRKIPIKKIDDVTARQVTFSKRKSGLFKKARELSLLCDAEIALIVFSPGGKLFDYGSSSMQKVIERHILRSELNLEKLDQSCPTEQVRCNYADLNKEFADRTREMRQLNGEELQGLTLRELQKLEERLDSSLNRVYKAKVENFIKEIGILKEKGKKLMEDNMLIKQMIKLPRNEICSVQRHEHEQGQLFDTSLTLGLPFPAGSK

SEQ ID NO: 31725 - protein, 211 aa, Glycine max
  Clone ID: TF_GmC1907_1.pep
MVRRKIPIKKIDNVTARQVTFSKRKSGLFKKARELSLLCDSEIALIVFSPGGKLFDYASSSMQKVIERHILWSELNLEKLDQSCPTEQLRCNYADLNKEFGDRIREMRQLNGEELQGLALRELQKLEERLVSSLNRVYKAKVENFTREIDILKQKGNKLMEDNRLMKQRIKPRNEICSVQRHEHEQGRSFDTSLTLGLSFPAGSKYRVSEQ

SEQ ID NO: 31726 - protein, 123 aa, Glycine max
  unsure (1)..(123): unsure at all Xaa locations
  Clone ID: TF_GmC940_2.pep
APEAHPLLDAKEETNMLKQEIQTLQKGIRHLFGGGIXTMPIDELQVLEKNLETWIYHIRSMKMNIMLQEIQALKDKEGTLKAANKYLHDKIVENTAISNFAQFATDTSNSYPLIIQDEVFQLY

SEQ ID NO: 31727 - protein, 157 aa, Glycine max
  unsure (1)..(157): unsure at all Xaa locations
  Clone ID: TF_jC-gmXLIB3563P005ca07a2.pep
MVRGKTQMKRIENETSRQVTFSKRRNGLLKKAFELSVLCDAEVALIIFSTRGRLYEFSSSRCSSINKTVERYQRKIEDLGVSNKGIHENTQHLKEVDMSMAKKIEHLEDSRRKLLGDELDKCSIDELQQLENQLERSLDKIRATXNQLFRKRIEKLK

SEQ ID NO: 31728 - protein, 138 aa, Glycine max
  unsure (1)..(138): unsure at all Xaa locations
  Clone ID: TF_LIB4390-047-R1-K1-F9.pep
MGRGRVVLERIENKINRQVTFSKRRSGLLKKAFELSVLCDAEVGLIIFSSRGKLFQYSSTDITKIIERYRQCRYSKSHWXIHWNTIHRHFQGEDLEPLSFKDLQSLEKQLDITLALTRQHQTKKLMARADELREKVSC

SEQ ID NO: 31729 - protein, 566 aa, Glycine max
  unsure (1)..(566): unsure at all Xaa locations
  Clone ID: TF_GmC109_1.pep
MPTVSVGRDRLFAALGKTYTQEEFEDLCFSFGIELDDVTTEKAIVRKEKHLDEEEADEDEEVIYKIEVPANRYDLLCLEGLAQALRVFCEFQEIPTYRLSKISKDAMLKMHVKPETSLIRPYVVCAVLRGITFDKARYNSFIDLQDKLHQNICRRRTLVAIGTHDLDTLEGPFTYEALSSGMANFNLLKFHNFYTITAEIAFLNSXVNPSKGYTYARLLDHLFVKQELLTPLSPVSHRIYSRIVXESCHAALXATATGWIEQLFLXFFIQTNREMKNSVIEWSKIPVEFCGFEDIYCVGQSDVPVILSDTHAIIFYKIKLLGAFCFVHLYVIDNINIPDPCSFVELKIEIVDNKAPKIFPASSVLLSLDHLSERIGKXVALIGFTEVLTFILCSKKENFAMLNRKDDKSKAAIIGNPRSSDFEAVRTSLMPGILKTVAHNKDHPKPIKIFEVGDIAVLHEQRDVGAKNLRQLAALYCGANAGFEIIHGLVDRVMEKNGVPFVSPGDKSGYYIERSDEPEFLAGRQARIIYKGKHIGTFGIVHPEVLNNFDIPDPCSFVELNIESFL

SEQ ID NO: 31730 - protein, 186 aa, Glycine max
  Clone ID: TF_GmC1414_1.pep
MGKKKVEIKRIENKSTRQITFSKRRNGLMKKARELSILCDAKVALLIFSSTGKLYELCNGDSLAEVVQQYWDHLGASGTDTKSQELCFEIADIWSGSAFSQMIKRHFGVSELEHLSVSDLMELEKLTHAALSRIRSAKMRLMMESVVNLKKKIEALEKTNDVNNVVTRSIDCDQTDGVTHNLFPGL

SEQ ID NO: 31731 - protein, 166 aa, Glycine max
  unsure (1)..(166): unsure at all Xaa locations
  Clone ID: TF_GmC1834_3.pep
MVRGKTQMRRIENATSRQVTFSKRRNGLLKKAFELSVLCDAEVALIIFSPRGKLYEFASSSMQDTIERYRRHNRSAQTVNRSDEQNMQHLKQETANLMKKIELLEASKRKLLGEGLGSCSLEELXQIEQQLERSVSNVPARKNQVYKEQLDQLKEKERALYAENAR

SEQ ID NO: 31732 - protein, 152 aa, Glycine max
  Clone ID: TF_GmC59564_1.pep
MGRGKIEIKKIENLNSRQVTFSKRRNGLLKKAKELSVLCDAEVAVIIFSSTGKLYEFSNTSMEHTLSRYSKGAESDSAEQPIDVPPTDVMAVEPDTNLLMEEITKLRSAYLRMMGKELDGLSLKELQQLENQLSEGMQSVKDKKEQVLVEQL

SEQ ID NO: 31733 - protein, 125 aa, Glycine max
  unsure (1)..(125): unsure at all Xaa locations
  Clone ID: TF_GmC182_5.pep
MGRGRVELKRIENKINRQVTFAKRRNGLLKKAYELSVLCDAEVALIIFSNRGKLYEFCSSSSMLKTLERYQKCSYGAVEVTKPAKELESSYREYLKLKARFESLQRTQRNLLGEDLGPLNTXELE

SEQ ID NO: 31734 - protein, 119 aa, Glycine max
  unsure (1)..(119): unsure at all Xaa locations
  Clone ID: TF_GmC7654_3.pep
RRRRLCKTLPFDKLGFWKPVLPAARWELRFKASRRANPPHEGHQRHVPLGGRGPLLLVGKRTAGARVASSPDSDLEAFSHNPTHGSFAPLAFQPSAMTNCANQRFLSYXVKLLLRHCHQ

SEQ ID NO: 31735 - protein, 125 aa, Glycine max
  Clone ID: TF_jC-gmX3050018F05sg15D17b1.pep
LIAARRRQKGGGELEGLSPKNPQKQEQQHESALKHTRPRKNQLTHETIPEPHKKEKALQEQNNTLAKKTKEKEKALAQQAQPERIGDEGDQTSSAQEPQPPVTTNIRTPTQTRGEGDNQRTPTPT

SEQ ID NO: 31736 - protein, 128 aa, Glycine max
  Clone ID: TF_GmC1905_2.pep
KPCGIFAFQDILGEGLSSLSLKELKNLESRLEKGLSRVRSRKHETLFADIEFMQKREIELQNHNNFLRAKIAENERAQQRQQDMIPGTECESTIPNSQSYDRNFFPVNLIDSNNNQYSRQDQTALQLV

SEQ ID NO: 31737 - protein, 211 aa, Glycine max
  Clone ID: TF_700889004_FLI.pep
MVRGKTQLRRIENATSRQVTFSKRRNGLLKKAFELSVLCDAEVALIIFSPRGKLYEFASSSMQDTIERYRRHNRSAQTVNRSDEQNMQHLKQETANLMKKIELLEASKRKLLGEGLGSCSLEELQQIEQQLERSVSSVRARKNQVYKEQIDQLKEKERALYAENARLCEQYGGIQPQPATKDPKEIQPYAESSPSSEVETELFIGLLRSSY

SEQ ID NO: 31738 - protein, 211 aa, Glycine max; identical to SEQ ID NO: 31737
  Clone ID: TF_GmC1834_1.pep

SEQ ID NO: 31739 - protein, 123 aa, Glycine max
  unsure (1)..(123): unsure at all Xaa locations
  Clone ID: TF_GmC182_2.pep
ASWAIGFIKASEVKTQFMLDXLSDLQSKEQMLVEANRSLTVKLEEINSRNHYRQSWEAGDQSMPYGGGGPENSHSHQGFFQPLECNPTLHIGPDYRYNAVASDQITATTQPQQVSGFIPGWML

SEQ ID NO: 31740 - protein, 222 aa, Glycine max
  Clone ID: TF_GmC132_1.pep
MGRGKIEIKRIENTTNRQVTFCKRRNGLLKKAYELSVLCDAEVSLIVFSSRGRLYEYSNNNIRSTIERYKKACSDHSSASTTTEINAQYYQQESAKLRQQIQMLQNSNRHLMGDALSTLTVKELKQLENRLERGITRIRSKKHEMLLAEIEYFQKREIELENENLCLRTKITDVERIQQVNMVSGPELNVIQALASRNFFNPNMLDGGTVYPQTDKKILHLG

SEQ ID NO: 31741 - protein, 222 aa, Glycine max; identical to SEQ ID NO: 31740
  Clone ID: TF_GmC132_2.pep

SEQ ID NO: 31742 - protein, 220 aa, Glycine max
  Clone ID: TF_LIB5068-015-A1-XP1-H9.pep
RGIENTTNRQVTFCKRRNGLLKKAYELSVLCDAEVALVVFSSRGRLYEYANNSVRGTIERYKKACAASTNAESVSEANTQFYQQEASKLKRQIRDIQNLNRHILGEGLSSLSLKELKNLESRLEKGLSRVRSRKHETLFADIEFMQKREIELQNHNNFLRAKIAENERAQQRQQDMIPGTECESTIPNSQSYDRNFFPVNLIDSNNNQYSRQDQTALQLV

SEQ ID NO: 31743 - protein, 71 aa, Glycine max
  Clone ID: TF_uC-gmflminsoy115h02b1.pep
QTPDCRLTACKLGLGHMKGEDINSVNYKELMALEDALETGLVSDRDKQGAVYWMSMRHDKILEEENMELTF

SEQ ID NO: 31744 - protein, 275 aa, Glycine max
  unsure (1)..(275): unsure at all Xaa locations
  Clone ID: TF_GmC157106_1.pep
MYLFLNPPVTFFCFRVRFLFLGLALLRIASYVGELSTKKMGRGRVQLKRIENKTSQQVTFFKRRSGLLKKASEISVLCDAQVALIIFSTKGKLFEYSSERSMEDLLERYERCSHTALAGANNVESPGFWSFEHIKLTAKVEVLERNIMNFFGNDLDPLSLKELHSLEQQIETSLKRIRTRKNQVMNQSVSDLHKKARTLQVQNRWLGKMKEKAKTVTEGPHNGPETLGFDSSTLNLSSPQLPPPPSPXRLVPSLTLSETMQGRNTSWKKRVKAQT

SEQ ID NO: 31745 - protein, 244 aa, Glycine max
  Clone ID: TF_GmC734_1.pep
MGRGRVQLKQIENKISRQVTFSKRRTGLRKKANEISVLCDAQVALIVFNAKGKLFEYSSESSMENVLERYERHTHIGKLVGDGDESQGNWSLQCFKLTGKVEVLERNLRNFVGEDLDPLNLRELQSLEHQLETAIKRIRTRKNQVMNESISDLQKKARQLQEQNGILTKKIKEKGKEVVERPHCGPETLGLTCPPELQRQQRVFPSLTLCETLQAGHLEEVVEARTVPTASTHIPPWMLHPFTR

SEQ ID NO: 31746 - protein, 225 aa, Glycine max
  unsure (1)..(225): unsure at all Xaa locations
  Clone ID: TF_GmC528_1.pep
MVRGKTQMKRIENETSRQVTFSKRRNGLLKKAFELSVLCDAEVALIIFSTRGRLYEFSSSXSINKTVERYQRKIEDLGVSNKGIHENTQHLKEVDMSMAKKIEHLEDSRRKLLGDELDKCSIDELQQLENQLERSLDKIRATKNQLFRKRIEKLKEEEKCLLEVNKRLREQYRIERQRCLSDQDVEFATKKEGEEVETELFIGRPERRMPLKLKPTTYSAHAYIA

SEQ ID NO: 31747 - protein, 246 aa, Glycine max
  Clone ID: TF_GmC176_1.pep
MGRGKVELKRIENKINRQVTFAKRRNGLLKKAYELSVLCDAEVALIIFSNRGKLYEFCSGHSMAKTLERYHRCSYGALEVQHQPEIETQRRYQEYLKLKSRVEALQQTQRNLLGEELEHLDVNDLEQLERQLDSSLKQIRSNKTQQMLDQLSDLHRKEEMLLETNNILRNKLEEINVALQPTWEAREQNAPYNCHPPQTEGYYETATAHCSSTLRIGYDSSGLNEAGGAAGASAQNASEFMHGWMN

SEQ ID NO: 31748 - protein, 119 aa, Glycine max
  Clone ID: TF_LIB4127-088-Q1-N1-F3.pep
MGRGRVQLKRIENKINRQVTFSKRRAGLLKKAHEISVLCDAEVALIVFSHKGKLFEYATDSCMEKILERYERYAYAERQLVANDSESQGNWTIEYTRLKAKIDLLQRNHRHYMGEDLGS

SEQ ID NO: 31749 - protein, 208 aa, Glycine max
  Clone ID: TF_GmC1602_1.pep
MGRGKIEIKRIENSSNRQVTYSKRKNGILKKAKEITVLCDAQVSLIIFAASGKMHDYISPSTTLIDILERYHKTSGKRLWDAKHENLNGEIERLKKENDSMQIELRHLKGDDINSLNYKELMALEDALETGLVSVREKQMDVYRMLRRNDKILEEENRELNFLWQQRLAEEGAREVDNGFDQSVRDYNSHMPFAFRVQPMQPNLQERI

SEQ ID NO: 31750 - protein, 254 aa, Glycine max
  Clone ID: TF_GmC182_4.pep
MGRGRVELKRIENKINRQVTFAKRRNGLLKKAYELSVLCDAEVALIIFSNRGKLYEFCSSSSMLKTLERYQKCSYGAVEVSKPAKELESSYREYLKLKARFESLQRTQRNLLGEDLGPLNIKELEHLERQLDSSLKQVRSTKTQFMLDQLSDLQTKEQMLVEANRSLTVKLEEINSRNHYRQSWEAGDQSMPYGGGGPENSHSHSHSQGFFQPLECNPTLHIGPDYRYNAVASDQITATTQPQQVSGFIPGWML

SEQ ID NO: 31751 - protein, 236 aa, Glycine max
  Clone ID: TF_GmC4870_6.pep
MGRGRVVLERIENKINRQVTFSKRRSGLLKKAFELSVLCDAEVALIIFSSRGKLFQYSSTDINKIIERYRQCRYSKSQTDDSLEHDSQSSYHEFLKLRAKYESLELTQRHFQGEELEPLSFKDLQSLEKQLDITLALTRQHQTKKLLARADELREKVHKLEDLNKQLESKEKDEFSSLILDNNNYIQVHATQGDQFESGTTLNTCRFQRQDSKEKAIDTKTDGSQSSHNKNKGWLL

SEQ ID NO: 31752 - protein, 243 aa, Glycine max
  Clone ID: TF_GmC791_1.pep
MGRGKIEIKLIENPTNRQVTYSKRRNGIFKKAHELSVLCDAKVSLIMFSKNNKMHEYISPGLTTKKIIDQYQKTLGDIDLWHSHYEKMLENLKKLKDINNKLRRQIRHRIGEGLDMDDMSFQQLRTLEEDMVSSIGKIRERKFHVIKTRTDTCRKKVKSLKQMNGNLLLELKEKCVIHPQFLLHDEGDEESAAAAAAAAVALANGASTLYAFCHQHHSHLNLFSHHSNGEEQPFKTDHDLRLA

SEQ ID NO: 31753 - protein, 234 aa, Glycine max
  Clone ID: TF_GmC1762_1.pep
MARGKIQIKRIENTTNRQVTYSKRRNGLFKKANELTVLCDAKVSIIMFSSTGKLHEYISPSTSTKQFFDQYQMTLGVDLWNSHYENMQENLKKLKDVNRNLRKEIRQRMGDCLNDLGMEDLKLLEEEMDKAAKVVRERSCMTWREKQKHVTHRIVTQRKKFNNEKEVHNRLLRDLDARAEDPRFALIDNGGEYESVIGFSNLGPRMFALSLQPSHPSAQSGAAGSDLTTYPLLF

SEQ ID NO: 31754 - protein, 241 aa, Glycine max
  Clone ID: TF_GmC1499_2.pep
MGRGRVELKRIENKINRQVTFAKRRNGLLKKAYELSVLCDAEVALIIFSNRGKLYEFCSSSSMLKTLERYQKCNYGAPEANVSTQEALELSSQQEYLRLKARYEALQRSQRNLMGEDLGPLSSKELESLERQLDSSLKQIRSIRTQFMLDQLSDLQRKEHFLGESNRDLRQRLEEFQINPLQLNPSAEDMGYGRHPGQPQGHALFQPLECEPTLQIGYHPDPVSVVTEGPSMNNYMAGWLP

SEQ ID NO: 31755 - protein, 243 aa, Glycine max
  Clone ID: TF_GmC951_1.pep
MAFPDPSMSVSPQRKMGRGKIEIKRIENTTNRQVTFCKRRNGLLKKAYELSVLCDAEVALIVFSSRGRLYEYANNSVKATIERYKKASSDSSGAGSASEANAQFYQQEADKLRQQISNLQNNNRQMMGDSLGSLTAKDLKNLETKLEKGISRIRSKKNELLFAEIEYMQKREIDLHNNNQLLRAKIAESERNHHNMAVLPGGSNYDSMQSSQQQFDSRGYFQVTGLQPNNQYARQDQMSLQLV

SEQ ID NO: 31756 - protein, 246 aa, Glycine max
  unsure (1)..(246): unsure at all Xaa locations
  Clone ID: TF_GmC1905_1.pep
MEYRNEAIREEYSQKGTGXGKIGVKRIKHTNELSSNLRANRRNGLLKKXAYELSVLCDAEVALVVFSSRGRLYEYANNSVRGTIDRYKKACAASTNPESVXSEANTQFYQQEASXKLKRQIRDIQNLNRHILGEALSSLSLKELKNLESRLEKGLSRVRSRKHETLFADIEFMQKREIELQNHNNFLRAKIAEHEKAQQRQQDMIPGNVCESTIPPQSYDRNFFPVNLIDSNNQYSNQDQTALQLV

SEQ ID NO: 31757 - protein, 227 aa, Glycine max
  Clone ID: TF_GmC130282_1.pep
MVREKIQIKKIDNATARQVTFSKRRRGLFKKAEELSVMCDADVALIIFSSTGKLFEYSSSSMKEILERHHLHSKNLARMEQPSLELQLVENSNCSRLSKEVAEKSHQLRQLRGEDLQGLNIEELQQLERSLETGLGRVIEKKGEKIMSEITDLQRKGMLLMEENERLKRHVAGIINGQRHGGAESENFVMDEGQSSESVTYVCNSTGLPQDYESSDTSLKLGLPYSG

SEQ ID NO: 31758 - protein, 224 aa, Glycine max
  Clone ID: TF_GmC1362_1.pep
MVRGKTQMKRIENATSRQVTFSKRRNGLLKKAFELSVLCDAEVALIIFSPRGKLYEFASSSIQESIERYRRHTKHVNPTTFRSVEQNMQHLKQEAENMMKKIDLLEAAKRKFLGEGLGACSIEELQRIEQQLERSLSNVRARKVFKEQIEQLKEKEKALLDENAKLTENARLSEKHDIHLQPATKNQNVNQPQCNAESSSSSDVETELFIGLPDTRARHISHHV

SEQ ID NO: 31759 - protein, 128 aa, Glycine max
  Clone ID: TF_GmC1499_5.pep
GEDLGPLSSKELESLERQLDSSLKQIRSTRTQFMLDQLSDLQRKEHLLSEANRSLRQRQLEGYQINPLQLNPGVEEMGYGRHPAQTHGEALFQQMECEPTLQIGYQPDPVSVVTAGPSMSNYMAGWLP

SEQ ID NO: 31760 - protein, 158 aa, Glycine max
  Clone ID: TF_GmC4870_4.pep
GRGRVVLERIENKINRQVTFSKRRSGLLKKAFELSVLCDAEVGLIIFSSRGKLFQYSSTDITKIIERYGQCRYSKSHTGDSLEHDSQSAYHEFLKLRAKYESLERTQRHFQGEDLEPLSFKDLQSLEKQLDITLALTRQHQTKKLMARADELREKVSC

SEQ ID NO: 31761 - protein, 245 aa, Glycine max
  Clone ID: TF_GmC175_1.pep
MGRGRVELKRIENKINRQVTFSKRRNGLLKKAYELSVLCDAEVALIIFSSRGKLYEFGSVGTTNTIERYQRSSFTPQDEHVECETQSWYQEVSKLKAKYESLQRTQRHLLGEDLGPLNIKELQNIEKQLEGALAQARQRKTQIMIEQMEELRRRERHLGDMNKQLRLKLEAEGFNLKATESLLSFTSAAGNSGFHFQQPPQTNPIDYQQPEPFLQIGYHQYVQSEASNVPKSMACETNFMQGWIL

SEQ ID NO: 31762 - protein, 232 aa, Glycine max
  Clone ID: TF_GmC1805_1.pep
MGRGKVVLERIQNKINRQVTFSKRRNGLLKKAFELSVLCDAEIALVIFSSRGKLFQYSSTDINRIIEKYRQCCFNMSQTGDVAEHQSEQCLYQELLVLRVKHESLQRTQRNLLGEELEPLSMKELHSLEKQLDRTLAQARKHLTQKLVSRIDELHGKVHSLEQANKHLESQERGKCTQICEGSPNGHILQDKQVNQFEYGTAGSFRLQQEQTTASKGKEIETIEDWLRPKQS

SEQ ID NO: 31763 - protein, 207 aa, Glycine max
  unsure (1)..(207): unsure at all Xaa locations
  Clone ID: TF_GmC1110_1.pep
MGRGKIEIKRIENSSNRQVTYSKRKNGILKKAKEISVLCDAQVSLIIFGVSGKMHEYISPSTTLIDVLDRYQRASGKTLWDAKHENLSNEIDRIKKENDSMQIELRHLKGEDITSLNYKELMALEDALENGLSGVREKKMEVHRMFKRNDKILEEQNKELNFLLQQHLALEGVGNXMDNGFNEIKRVFNSHMQRAASLKQPNLKERI

SEQ ID NO: 31764 - protein, 243 aa, Glycine max
  Clone ID: TF_GmC138_1.pep
MGRGRVQLKRIENKINRQVTFSKRRGGLLKKAHEISVLCDAEVALIIFSHKGKLFEYATDSCMEKILERHERYAYAERQLVANDSETQENWTIEYTRLKAKIDLLQRNHRHYMGEDLASMSLKELQSLEQQLVTGIKNIRTRRNDLMSESISELQKKEKRIQEENNTLAKKIKEKEQAVAQQAAQWEQPNYRVDTSFMPQQQPLPTSLNICGNNYCQEAAPELGRNGLDLTLEPLYSCNLGCF

SEQ ID NO: 31765 - protein, 132 aa, Glycine max
  Clone ID: TF_GmC1362_2.pep
EAANMMKKIGLLEAAKRKFLGEGLGACSIEELQWIEQQLERSLSNVRTRKIQVFKEQIEQLKEKEKVLLDENVKLTENGRLSEKHGINLQTETKKQNVNQPQYNAGSPSSDVETELIIGLPDTRTRRIVHQV

SEQ ID NO: 31766 - protein, 248 aa, Glycine max
  Clone ID: TF_GmC182_1.pep
MGRGRVELKRIENKINRQVTFAKRRNGLLKKAYELSVLCDAEVALIIFSTRGKLYEFCSTNSMLKTLERYQKCSYGAVEVSKPGKELESSYREYLKLKARFESLQRTQRNLLGEDLGPLNTKDLEQLERQLDSSLKQVRSTKTQFMLDQLADLQNKEHMLVEANRSLTMKLEEINSRNQYRQTWEAGEQSMSYGTQNAHSQGFFQPLECNPTLQIGSDYRYNPEASEQQLAATTQAQQVNGFIPGWML

SEQ ID NO: 31767 - protein, 73 aa, Glycine max
  unsure (1)..(73): unsure at all Xaa locations
  Clone ID: TF_GmC1905_11.pep
VVEAAVKRERTMAYAFSHQWRACSSQGLGNYELGKASWSWSXKDRWIVALPNSIIFISRKRPNLKDKSQTFRI

SEQ ID NO: 31768 - protein, 94 aa, Glycine max
  Clone ID: TF_LIB3028-045-Q1-B1-E5.pep
TLERYQKCNYGAPEDNVATKEALELSSQQEYLRLKARYEALQRSQRNLMGEDLGPLSSKELESLERQLDSSLKQIRSIRTQFMLDQLSDLQRKV

SEQ ID NO: 31769 - protein, 241 aa, Glycine max
  Clone ID: TF_GmC1499_3.pep
MGRGRVELKRIENKINRQVTFAKRRNGLLKKAYELSVLCDAEVALIIFSNRGKLYEFCSSSSMLKTLERYQKCNYGAPEANVSTREALELSSQQEYLKLKARYEALQRSQRNLMGEDLGPLSSKELESLERQLDSSLKQIRSTRTQFMLDQLSDLQRKEHLLSEANRSLRQRLEGYQINPLQLNPGVEEMGYGRHPAQTHGEALFQQMECEPTLQIGYQPDPVSVVTAGPSMSNYMAGWLP

SEQ ID NO: 31770 - protein, 233 aa, Glycine max
  Clone ID: TF_GmC791_2.pep
MGRGKIEIKLIENPTNRQVTYSKRRNGIFKKAHELSVLCDAKVSLIMFSKNNKMHEYISPGLTTKRIIDQYQKTLGDIDLWRSHYEKMLENLKKLIDINNKLRRQIRHRIGEGLDMDDMSFQQLRTLEEDLVSSIGKIRERKFHVIKTRTDTCRKKVKSLEQMNRDLLFELEKCAIHPQFILHDEGDEESAVALANGASTLYAFCHQHHSHLNLPSHHSHGEEPFKTDDLRLA

SEQ ID NO: 31771 - protein, 183 aa, Glycine max
  unsure (1)..(183): unsure at all Xaa locations
  Clone ID: TF_LIB4165-007-Q1-K1-B5.pep
MGRGKIEIKLIENPTNRQVTYSKRRNGIFKKAHELSVLCDAKVSLIMFSKNNKMHEYISPGLTTKRIIDQYQKTLGDIDLWRSHYEKMLENLKKLIDINNKLRRQIRKLIGGVVLCELERHRIGEGLDMDDMSFQQLRTLEEDXVSSIGKIRERKFHVXQNTTDTCRXKVKSLXQMNRDLLFE

SEQ ID NO: 31772 - protein, 96 aa, Glycine max
  Clone ID: TF_LIB4127-114-Q6-K1-G8.pep
LEGLFETGLGRVIKKKGEKIMSEIPDLQRKGMLLMEENERLKRHVAGIINGQRHGGAESENFVMDEGQSSESVTYVCNSTGPPQDFESSDTSLKLG

SEQ ID NO: 31773 - protein, 148 aa, Glycine max
  Clone ID: TF_700738341_FLI.pep
MQDTIERYRRHNRSAQTVNRSDEQNMQHLKQETANLMKKIELLEASKRKLLGEGLGSCSLEELQQIEQQLERSVSNVRARKNQVYKEQIDQLKEKERALYAENARLCEQYGIQPQPATKDPKEIQPYAESSPSSEVETELFIGLPRSI

SEQ ID NO: 31774 - protein, 221 aa, Glycine max
  unsure (1)..(221): unsure at all Xaa locations
  Clone ID: TF_GmC1499_1.pep
MGRGRVELKRIENKINRQVTFAKRRNGLLKKAYELSVLCDAEVALIIFSNRGKQYEFCSGSSMLKTLERYQKCNYGAPEDNVATKEALELSSQQEYLRLKARYEALQRSQRNLMGEDLGPLSSKELESLERQLDSSLKQIRSIRTQFMLDQLXDLQRKEHFLGESNRDLRQRLEEFQINPLQLNPSAEDMRVWTPYRYHPDPVSVVTEGPSMNNYMAGWLP

SEQ ID NO: 31775 - protein, 159 aa, Glycine max
  Clone ID: TF_GmC138_2.pep
MGRGKVQLKRIENKINRQVTFSKRRSGLLKKAHEISVLCDAEVALIVFSHKGKLFEYATDSCMEKILERHERYAYAERQLVANDSETQGNWTIEYTRLKAKIDLLQRNHRHYMGEDLASMSLKELQSLEQQLDTAIKNIRTRRNDLMYASISELQKRRK

SEQ ID NO: 31776 - protein, 215 aa, Glycine max
  Clone ID: TF_GmC297_2.pep
MGRGRVEFKRIENKINRQVTFSKRRSGLLKKAREISVLCDADVAFIAFYTKGKLLDYSNQPCSERILEPCERDSYAERELVGDDQPPNENWVIEHEKLRLGWRYYSRNQRNLMGEDLDRLNLTGLQRWEHQLDSALKHIRSRKNQAMNESISELQKKDRTLREHNSLLSKKIKEKEKELTPQEQEGLQNNMDVSSVLVTQPLESLTIGLVSFCDV

SEQ ID NO: 31777 - protein, 200 aa, Glycine max
  Clone ID: TF_GmC1414_3.pep
MGKKKVEIKRIENKSTRQITFSKRRNGLMKKARELSILCDAKVALLIFSSTGKLYELCNGDSLAEVVQQYWDHLGASGTDTKSQELCFEIADIWSGSAFSQMIKRHFGVSELEHLSVTDLMELEKLVHAALSRIRSAKMRLMMESVENLKKKEHILRNENELLEKQIEAQKKADDVNNVVTRFIDYDQTDRVTHNLLPGL

SEQ ID NO: 31778 - protein, 241 aa, Glycine max
  unsure (1)..(241): unsure at all Xaa locations
  Clone ID: TF_GM459L07rgnA2.C1.o17.ma.pep
MGRGRVELKRIENKINRQVTFAKRRNGLLKKAYELSVLCDAEVALIIFSNRGKLYEFCSSSSMLKTLERYQKCNYGAPEANVSTREALVMELSSQQEYLKLKARYESLQRSQRNLMGEDLGPLSSKELESLERQLDSSLKQIRSTRTQFMLDQLSDLQRKEHLLSEANRSLRQRLEGYQINPLQLNPGVEEMGYGRNPAQTHGEALFQQMECEPTLQIGXTAGPSMSNYMAGWLPYLPCMK

SEQ ID NO: 31779 - protein, 227 aa, Glycine max
  Clone ID: TF_GmC1762_2.pep
MARGKIQIKRIENTTNRQVTYSKRRNGLFKKANELTVLCDAKVSIIMFSSTGKLHEYISPSTSTKQFFDQYQMTLGVDLWNSHYENMQENLKKLKDVNRNLRKEIRQRMGDCLNDLGMEDLKLLEEEMDKAAKVVRERKYKVITNQIDTQRKKFNNEKEVHNRLLHDLDAKAEDPRFALIDNGGEYESVIGFSNLGPRMFALSLQPSHPSAQSGAAGSDLTTYPLLF

SEQ ID NO: 31780 - protein, 157 aa, Glycine max
  Clone ID: TF_GmC951_2.pep
MAFPDPSMSVSPQRKMGRGKIEIKRIENTTNRQVTFCKRRNGLLKKAYELSVLCDAEVALIVFSSRGRLYEYANNSVKATIERYKKASSDSSGAGSASEANAQFYQQEADKLRQQISNLQNNNRQMMGDSLGSLTAKDLKNLETKLEKGISRDSVQK

SEQ ID NO: 31781 - protein, 141 aa, Glycine max
  Clone ID: TF_GmC1468_1.pep
TWFIISTPICLLLEANLSSWKINCDITLIAIIYSGFFSTGLSSLVHTWGLHLKGPVYISIFKPLSIVVAAALSVIFLGDALYFGSVVGAVILSFGFYAVLWGKAKEEELTVVDFDDIRPPSNTKSPLLQSYKVKDEDNQNI

SEQ ID NO: 31782 - protein, 244 aa, Glycine max
  Clone ID: TF_GmC176_2.pep
MGRGKVELKRIENKINRQVTFAKRRNGLLKKAYELSVLCDAEVALIIFSNRGKLYEFCSGHSMAKTLERYHRCSYGALEVQHQPEIETQRRYQEYLKLKSRVEALQQTQRNLLGEELEHLDVKDLEQLERQLDSSLKQIRSNKTQQMLDQLADLHRKEEMLLETNNILRNKLEEINVALQPTWETREQNAPYNYHPSQSEGYYETAHCNSTLRIGYDSSGLNEAGGAAGTSAQNASEFMNGWMN

SEQ ID NO: 31783 - protein, 153 aa, Glycine max
  unsure (1)..(153): unsure at all Xaa locations
  Clone ID: TF_jC-gmXLIB3564P107dc10b1.pep
EERAPTHPYGCEKTTEGHRINAQYYQQESVSEQKYRCCKSNRHLMXVVSRVTEKELKQQENRLQRGGARGRSKXHEMLWAEIEYFQKREIELENENLCLRTKITDVERIQQVNMGSGPELNVIQALASRNFFNPNMLDGGTVYPQTDKKILHL

SEQ ID NO: 31784 - protein, 223 aa, Glycine max
  Clone ID: TF_GmC4870_8.pep
MGRGRVVLERIENKINRQVTFSKRRSGLLKKAFELSVLCDAEVGLIIFSSRGKLFQYSSTDITKIIERYRQCRYSKSHTGDSLEHDSQSAYHEFLKLRAKYESLERTQRHFQGEDLEPLSFKDLQSLEKQLDITLALTRQHQTKKLMARADELREKEKDEFSSLILDNNNYIQMHATQVDQFESETALNTCRFQHQEVVSKEKAIDTRTEHSQSSHNKNNGWL

SEQ ID NO: 31785 - protein, 215 aa, Glycine max
  unsure (1)..(215): unsure at all Xaa locations
  Clone ID: TF_GmC698293_1.pep
MARGKVQLKKIEDTTSRQVAFSKRRSGLLKKAYELSVLCDAEVAVIVFSQNGRLYEFSSSDMTKILERYREHTKDVPGSKILSTIXIQQLKLDSASLAKKIELLEHSKRELLGQSVSSCSYDELKGIEEQLQISLQRVRQRKTQLYTEQIDQLRSQESNLLKENAKLSAMWQRAEKSSQQQWPRHTQAEAEPHCSSSQSLDVDTELFIGLPKQQC

SEQ ID NO: 31786 - protein, 243 aa, Glycine max
  Clone ID: TF_GmC134_1.pep
MEDPNQAPEGSSQKKMGRGKIEIKRIENTTNRQVTFCKRRNGLLKKAYELSVLCDAEVALVVFSTRGRLYEYANNSVRATIERYKKANAAASNAESVSEANTQFYQQESSKLRRQIRDIQNLNRHILGEALGSLSLKELKNLEGRLEKGLSRVRSRKHETLFADVEFMQKREIELQNHNNYLRAKIAEHERAQQQQSNMNMSGTLCESLPSQSYDRNFFPVNLIASDDQQQYSRQDHTALQLV

SEQ ID NO: 31787 - protein, 257 aa, Glycine max
  Clone ID: TF_GmC134_2.pep
PGRPTRPPTRPYGCEKTTEGEAQEGSSQKKMGRGKIEIKRIENTTNRQVTFCKRRNGLLKKAYELSVLCDAEVALVVFSTRGRLYEYANNSVRATIERYKKANAAASNAESVSEANTQFYQQESSKLRRQIRDIQNLNRHILGEALGSLSLKELKNLEGRLEKGLSRVRSRKHETLFADVEFMQKREIELQNHNNYLRAKIAEHERAQQQQSNMMSGTLCESLPSQSYDRNFFPVNLIASDDQQQYSSQDHTALQLV

SEQ ID NO: 31788 - protein, 203 aa, Glycine max
  Clone ID: TF_GmC940_1.pep
MARGKVQLKRIENPVHRQVTFCKRRAGLLKKAKELSVLCDAEIGLFIFSAHGKLYELATKGTMQGLIERYMKFTRGAQPEAAAPEAHPLLVAKEETNALKQEIQTLQKGISYLFEGGNKTMAIDELQLLEKNLETWIYHIRSMKMNIMLQEIQALKDKEGTLKAANKYLHDKIVENTAISNFAEFATDTSYPLIVQDGGFQLY

SEQ ID NO: 31789 - protein, 243 aa, Glycine max
  Clone ID: TF_GmC694_1.pep
MAFPNQSMSSESPQRKMGRGKIEIKRIENTTSRQVTFCKRRNGLLKKAYELSVLCDAEVALIVFSNRGRLYEYANNSVKASIERYKKASSDSSSGGRSASEANAQFYQQEAAKLRVQISNLQNHNRQMMREGLSTMNGKDLKNLETKLEKGISRIRSKKNERLFAEIEHMKKREIHLNNDNQLLRAKIAAGERSHHNVNGLSGSISYESMQSQFDSRGFFQVTGLQPNNNQYAGQDNMSLQFV

SEQ ID NO: 31790 - protein, 282 aa, Glycine max
  unsure (1)..(282): unsure at all Xaa locations
  Clone ID: TF_GmC1013_2.pep
MGRGKIVIRRIDNSTSRQVTFSKRRNGLLKKAKELAILCDAEVGVMIFSSTGKLYDFASSSMKSVMDRYSKSKEEPCQLGSSASEIKFWQREAAMLRQQLHNLQESHRRKMMGEELSGLTVKELQNLENQLEISLHGVRMKKDQLLMGEIQELNRKGNLIHQENVELYKKVYGTQDDNETNRDSVLTNGLGIGEDLQXACESPAKPATATTLQGTFRNYKIGIAIALIHLQDVCFTIAIKKNGLRFKPQCLRINVAYRPQTNWLKDFNLKLLEKVKATLACM

SEQ ID NO: 31791 - protein, 243 aa, Glycine max
  Clone ID: TF_GmC4870_1.pep
MGRGRVVLERIENKINRQVTFSKRRSGLLKKAFELSVLCDAEVGLIIFSSRGKLFQYSSTDITKIIERYRQCRYSKSHTGDSLEHDSQSAYHEFLKLRAKYESLERTQRHFQGEDLEPLSFKDLQSLEKQLDITLALTRQHQTKKLMARADELREKVHKLEDLNKQLESKVFSLNNHEKDEFSSLILDNNNYIQMHATQVDQFESETALNTWFQHQEVVSKEKAIDTRTEHSQSSHNKNNGWL

SEQ ID NO: 31792 - protein, 146 aa, Glycine max
  Clone ID: TF_uC-gmflLIB3275P070a02a1.pep
SVLCDAQVSLIIFGVSGKMHEYISPYTTLIDVLDRYKRASGKTLWDAKHENLSNEIDRLKKENDSMQIELRHLKGEDITSLNYKELMALEDALENGLSGVREKKMEVHRMFKRNGKILEEQNKELSFLLQQHLAVEGIGNMHEQWI

SEQ ID NO: 31793 - protein, 386 aa, Glycine max
  unsure (1)..(386): unsure at all Xaa locations
  Clone ID: TF_GmC87_1.pep
MKWLNKLFRGGPNRGRGGRHLHEPAEESRVWGAPSRALDDRARAQKEKEDLGHAMALSSAEDLKRPNAHQGYNWGEDTGDDYSKAPRDTLNSSAHPPFAPTPFYPHEYRRICGGCNQEIMYGNCLGCMDTYFHPNCFRCHSCGYPITELCFQFIPINAAGLIEYRCHPFWSQXYCPSHEYDNTARCCSCERLEPLNIKYYRLEDGRSLCLECMESAIMDTGDCQPLYHSIRDYYEGMQMRIDQQIPMLLVEREALNEAIVGEKNGAILAHELMHAWLRLNGYRNLNPEVEEGICQVLSYMWLESEVMPSFQNMPSTSTSAASSYSSSKKGAKSHVENKLGEFFKNQIANDSSPAYGGGFRAANEAVNRYGLRRTLDHIHWTGFFPV

SEQ ID NO: 31794 - protein, 64 aa, Glycine max
  unsure (1)..(64): unsure at all Xaa locations
  Clone ID: TF_LIB3242-630-P2-J2-F5.pep
MAFAGTTXKCMACDKTVYLVDKLTADNRVYHKACFRCHHCIGTLMLIIYNSFEGVXYCMPHCDQ

SEQ ID NO: 31795 - protein, 171 aa, Glycine max
  Clone ID: TF_GmC7454_3.pep
QSLNLESPPRYGNENMYQPPIQYFPLGSRICAGCYTEIGFGRYLNCLNAFWHPECFRCRACNLPISDYEFSTSGNYPYHKSCYKESYHPKCDVCKHFIPTNPAGLIEYRAHPFWIQKYCPTHEHDGTPRCCSCERMESQEAGYIALKDGRKLCLECLDSSIMDTNECQPLH

SEQ ID NO: 31796 - protein, 79 aa, Glycine max
  unsure (1)..(79): unsure at all Xaa locations
  Clone ID: TF_uC-gmflLIB3275P088g01b1.pep
MATAGTTQNCKACDKAVYLVDTLTADNRVLHKACFRCHHCQGTLKLSNYDSFEVVLYMXPHFDQLGKRTGSLDKSFEGT

SEQ ID NO: 31797 - protein, 250 aa, Glycine max
  unsure (1)..(250): unsure at all Xaa locations
  Clone ID: TF_GmC5988_8.pep
MGWFTKLLKGSDHKILRGQYHGKYGEDRIWDNHHSSMDDLTDIEKEDIDRAIALSLSEEDHKGKKVVDEELCKIDDDEEDEHLVKVHLDEDERLAKIQQEEEERLAKIQQEDEHLAKIQQEEEERLAKIQQEDECLAKIQQEDERLAKAQLEEDEQLARAIQESLKIGSPPQYDNGSSILSFPHLFPPGYRICAGCKTEIGQGRFLSCMGGVWHPECFCCHACHLPITDYEFCMCRNGTYHXWCCGEKGG

SEQ ID NO: 31798 - protein, 461 aa, Glycine max
  Clone ID: TF_GmC7403_1.pep
MKWFGKIFNIGSSRGRGGGRHLQQPVEENMVWPAPARSLDDRARSRKEEEDLDHAIALSLGENFKRPTGYRWRTGTDEDYAKALQDRRFSSAHPPYAPVPFYPRGYGVPLHNRTCGGCNQEILYGNCLGVGHSYFHPDCFRCHSCRYPITEREFSLSGKHPYHKSCFKELTHPKCEVCHQYIPINAAGLIEYRCHPYWNQKYCPSHEYDNTARCCSCERLESRGERYYRLEDGRILCFECMESAITDTGECQPLYHSIRDYYEGMNMKIDQQVPMLLVGREALNEAIVGEKNGFHHSPETRGLCLSEEQTVTSVYRWPRIGGHRLISMRSQAQRLPRKCEVTAILVLYGLPRLLTGAILAHELMHAWLRLKGYQNLSLEVEEGICQVLSYMWLDAEVMSCARTTPSTSSSASSSSYSNSSKKGVKSLVENKLGGVGWWHLGAAMVLGGGFGERQLRLLLGR

SEQ ID NO: 31799 - protein, 224 aa, Glycine max
  unsure (1)..(224): unsure at all Xaa locations
  Clone ID: TF_LIB4390-036-R1-K1-B7.pep
GVYSSSRSERKSGFMKWLSKLFRGGSNRGRGCRHLHEPAEESIVRGAPSRALDDRGRAQKEKEDLGLVLALSSAEDLKRPNGYNWGEDTGDDYSKAPHDTLNSSAHPPFAPTPFYPHPHKYRRVCGGCNQEIMYGNCLGCMDTYFHPNCFRCHSCGYPITEREGSIHITICFQFIPINAAGLIEYRCHPFWSXKYCPSHEYDNTARCCXCERWEPXDIXYYRLE

SEQ ID NO: 31800 - protein, 361 aa, Glycine max
  unsure (1)..(361): unsure at all Xaa locations
  Clone ID: TF_GmC7454_1.pep
MYLPPIQYFPMGSWIWALCYTEIGYGRYLNCLNAFWHPECFRCRACNLPISDYEFSTSGNYPYHKSCYKESYHPKCDVCKHFXHPFWIQKYCPTHEHDGTTRCCSCERMESQEAGYIVLKYGRKLCLECLDSAIMDTNECQPLHADIQRFYESLNMKLDQQIPLLLVERQALNEAREGEKNGHYHMPETRGLCLSEELSTFSRRPRLGTTMDMRAQPYRPTTRCDVTAILILYGLPRLLTGSILAHEMMHAWLRLKGYRTLSQDVEEGICQVLSHMWLESELSSASGSNFVSASSSSASHTSRKGKRPQFERKLGEFFKHQIESDISPVYGGGFRAGQKAVSKYGLQRTLHHIRMTGTFPY

SEQ ID NO: 31801 - protein, 90 aa, Glycine max
  unsure (1)..(90): unsure at all Xaa locations
  Clone ID: TF_uC-gmroLIB3258P128b11b1.pep
MAFAGTTQTCMACDKTDYLVDQLTPDNRAFHKACLRRHYCIGTLRLSNYNCFDGVLYCKPHSDQLFKRAGSXLDKSCQGAPRIAKPHKNL

SEQ ID NO: 31802 - protein, 216 aa, Glycine max
  unsure (1)..(216): unsure at all Xaa locations
  Clone ID: TF_GmC1586_1.pep
MSFTGTTDKCKACDKTVYVVDMLTLEGIPYHKNCFRCSHCKGYLTMNTYSSMDGVLYCKPHFEQLFKESGNFSKNFQTAKSSDKQNETNKAPNRLSSMFSGTLDKCSVCXKTVYPLEKMTLEGECYHKNCFRCAHAGCHLTHSSYAALDGVLYCRHHFQQLFMEKGNYHHVLQSANHKKNVTPEPAEPAAEGDEEPPKPEESDSEEHTEEKPQNEA

SEQ ID NO: 31803 - protein, 198 aa, Glycine max
  Clone ID: TF_GmC102_1.pep
MSFIGTQQKCKACEKTVYPVDQLSADGTAYHKACFRCSHCKGTLKLSNYSSMEGVLYCKPHYEQLFKESGSFSKNFQSPAKLADKTTPELTRSPSKAASMFSGTQEKCATCGKTAYPLEKVTVEGQAYHKSCFKCSHGGCPITPSNYAALEGILYCKHHFSQLFKEKGSYNHLTKSASVKRAAAATAAATTAASVPES

SEQ ID NO: 31804 - protein, 207 aa, Glycine max
  Clone ID: TF_GmC102_4.pep
MNLDLKAIAMSFIGTQQKCKACEKTVYPVDQLSADGTAYHKACFRCSHCKGTLKLSNYSSMEGVLYCKPHYEQLFKESGSFSKNFQSPAKLADKTTPELTRSPSKAASMFSGTQEKCATCGKTAYPLEKVTVEGQAYHKSCFKCSHGGCPITPSNYAALEGILYCKHHFSQLFKEKGSYNHLNKSASVKRAAAATAAATTAASVPES

SEQ ID NO: 31805 - protein, 192 aa, Glycine max
  Clone ID: TF_GmC5796_1.pep
MMASFAGTTQKCKACEKTVYLVDQLTADNKIYHKSCFRCYHCKGTLKLSNYCSFEGVLYCKPHFDQLFKKTGSLDKSFEGIPRTARLERSTDQVQTNSKVSNLFAGTQEKCVACKKTVYPIEKVAVDGTSYHKACFRCTHGGCVISPSNYVAHEHRLYCRHHHTQLFKQKGNFSQLDKQENDEGVTENTITE

SEQ ID NO: 31806 - protein, 196 aa, Glycine max
  Clone ID: TF_GmC1184_2.pep
MAFAGTTQKCMACDKTVYLVDKLTADNRVYHKACFRCHHCKGTLKLSNYNSFEGVLYCRPHFDQLFKRTGSLDKSFEGTPKIAKPEKTGEEKPAATKVSSMFGGTRDKCAGCQKTVYPTEKVTVNGTPYHKSCFKCTHGGCVISPSNYIAHEGKLYCKHHHIQLIKEKGNLSQLEGDHEKSTEEEKINGEVVAAET

SEQ ID NO: 31807 - protein, 176 aa, Glycine max
  unsure (1)..(176): unsure at all Xaa locations
  Clone ID: TF_GmC102_3.pep
MSFIGTQQKCKACEKTVYPVDQLSADGTAYHKACFRCSHCKGTLKLSNYSSMEGVLYCKPHFEQLFKESGSFSKNFQSPAKLADKTTHELTRSPSKAASMFSGTQEKCATCGKTAYPLEKVTVEGQAYHXSCFKCSHXXGCPITPSNYAALEGIXYCSXHFXQLFRRKELYHLTSL

SEQ ID NO: 31808 - protein, 164 aa, Glycine max
  unsure (1)..(164): unsure at all Xaa locations
  Clone ID: TF_GmC102_5.pep
MSFIGTQQKCKACEKTVYPVDQLSADGTAYHKACFRCSHCKGTLKLSNYSSMEGVLYCKPHFEQLFKESGSFSKNFQSPAKLADKTTHELTRSPSKAASMFSGTQEKCATCGKTAYPLEKVTVEGQAYHKSCFKCSHGXGCPITPSNYAALEGILYCRNTSPAF

SEQ ID NO: 31809 - protein, 151 aa, Glycine max
  Clone ID: TF_21600799.pep
PRAEFGTRQPFPSGSFFEKGGMPYCQSCFQGTFSSKCAGCGNMASGQLINALGQKWHSQCFCCSYCRRPFNGLPYFEKDGKPYCEQHYHTSAGSICAGCRTAIVGRCVDALGQKWHPEHFVCSYCMNPLSGGGYTEQHGSPYCQECFANLF

SEQ ID NO: 31810 - protein, 84 aa, Glycine max
  Clone ID: TF_LIB3107-008-D2_FLI.pep
MAFAGTTQKCMACDKTVYLVDKLTADNRVYHKACFRCHHCKGTLKLSNYNSFEGVLYCRPHFDQLFKRTGSLDKSFEGTPKIAK

SEQ ID NO: 31811 - protein, 189 aa, Glycine max
  Clone ID: TF_GmC102_2.pep
MSFIGTQQKCEACDKTVYPVDQLSADGTAYHKACFKCSHCKGTLKLSNYSSMEGVLYCKPHYEQLFKETGSFKKNFQSPAKQAVKTTPELTRSPSKAASMFSGTQEKCATCGKTAYPLEKVTVEGQAYHKSCFKCSHGSCPITPSNYAALEGVLYCKHHFSQLFKEKGSYNHLIKSASIKREANSVPQA

SEQ ID NO: 31812 - protein, 196 aa, Glycine max
  Clone ID: TF_GmC1061_2.pep
MAFAGTTQKCMACDKTVYLVDKLTADNRVFHKACFRCHHCKGTLKLSNYNSFEGVLYCKPHFDQLFKRTGSLDKSFEGTPKIAKPEKNLEEKPAAAKVSSMFGGSREKCAGCQKTVYPTEKVTVNGTPYHKSCFKCCHGGCVISPSNYIAHEGKLYCKHHHVQLIKEKGNLTQLEGDNEKSATNGKINGEEVSAET

SEQ ID NO: 31813 - protein, 257 aa, Glycine max
  Clone ID: TF_GmC1586_2.pep
FGSRFNSLLSEVCAFLFNSSLFLRHPRREPKIKNKKINTINKGEKTNMSFTGTLDKCTACDKTVYVVDLLTLEGIPYHKNCFKCSHCKGCLTMCTYSSMDGILYCKTHFEQLFKESGNFSKNFAKSSEKQNELNRTPSKLSSMFSGTQDKCSVCTKTVYPLEKMTLEGECFHKTCFRCAHAGCPLTHSNYAALDGVLYCRVHFAQLFMEKGNYNHVLQAAAHRRTGSSTPPLLEEPSQEPAPPASHEDQTEEETPLE

SEQ ID NO: 31814 - protein, 125 aa, Glycine max
  Clone ID: TF_LIB5119-034-A1-PF1-B9.pep
MPNPKCEACGKTAYPLESVTALEKTFHKGCFKCTTCKTTLNLKNFKGYEGQIYCIPHTPTPKATAVTDSVLIKAAVNAPKKKAEGLAIAHRGARELAPAAADFTVNDTNVDQSTENQPDQSHIQY

SEQ ID NO: 31815 - protein, 188 aa, Glycine max
  unsure (1)..(188): unsure at all Xaa locations
  Clone ID: TF_GmC102_6.pep
MSFIGTQQKCKACEKTVYPVDQLSADGTAYHKACFRCSHCKGTLKLSNYSSMEGVLYCKPHYEQLFKESGSFSKNFQSPAKLADKTTPELTRSPSKAASMFSGTQEKCATCGKTAYPLEKVTVEGQAYHKSCFKCSHGGCPITPSNYAALXGILYCKHHFSQLFKEKGELYHLTKSASVKRAAAATAA

SEQ ID NO: 31816 - protein, 131 aa, Glycine max
  Clone ID: TF_GmC5796_4.pep
MASFAGTTQKCTACEKKVYWVEQLTADNKVYHKSCFRCHHCKGTLKLSNYCSFEGVLYCKPHFHQLFKMTGSLDKSFEGVPRSVRVERSADQVQTNKVSRLFSGTQEKCVGCKKTVYPIEKVAVDGKSYHK

SEQ ID NO: 31817 - protein, 226 aa, Glycine max
  Clone ID: TF_GmC1603_1.pep
MAFSGTQQKCKACDKTVHLVEGLSVDGAAYHKNCFRCSHCNGLLAISNYSSTEGVLYCKVHFEQLFKETGAYPKKSQSSGKPPLELNRAPSKLSAFFSGTQEKCSKCKKTVYPLEKLTVEGEFYHKSCFRCAHGGCFLTPSTYAALDGYLYCKPHFSQLFKEKGSYSYLSKQASLKKSEMQQQEQEAVEKATTTTMMIAQSQSQRRPTTTTKEAEQADDDHSEQEH

SEQ ID NO: 31818 - protein, 318 aa, Glycine max
  unsure (1)..(318): unsure at all Xaa locations
  Clone ID: TF_GmC5988_6.pep
MGWFTKLLKGSDYKILRGQYHGKYGEDRIWDNHHSSMDDLTDIEKEDIDRAIALSLSEEDHKGKKVVDYDSQSEDEELCKIDDEEDEHLVKVHLEEEERLAKIQQEEEERLAKIQQERFSTRRXCLAKIQQEDERLAKAQLEEDEQLARAIQESLKIGSPPQYDNGSSILSFPHLFPPGYRICAGCKTEIGQGRFLSCMGGVWHPECFCCHACHLPITDYEFSMSSNRPYHKSCYREKHHPRCDVCKNFIPTNSSGLIEYRAHPFWLQKYCPSHELDGTSRCCSCERMEPRDTKYLLLDDGRKLCLECLDSSIMDTHE

SEQ ID NO: 31819 - protein, 71 aa, Glycine max
  Clone ID: TF_uC-gmropic020d02b1.pep
MMASFAGTTQKCKACEKTVYLVELLTADNKIYHKSCFRCYHCKGTLKLSNYCSFEGVLYCKPHFDQLFKKT

SEQ ID NO: 31820 - protein, 196 aa, Glycine max
  Clone ID: TF_GmC1061_1.pep
MAFAGTTQKCMACDKTVYLVDKLTADNRVFHKACFRCHHCKGTLKLSNYNSFEGVLYCKPHFDQLFKRTGSLDKSFEGTPKIAKPEKNLEEKPAAAKVSSMFGGTREKCAGCQKTVYPTEKVTVNGTPYHKSCFKCCHGGCVISPSNYIAHEGKLYCKHHHVQLIKEKGNLTQLEGDNEKSATNGKINGEEVSAET

SEQ ID NO: 31821 - protein, 196 aa, Glycine max
  Clone ID: TF_GmC1061_3.pep
MAFAGTTQKCMACDKTVYLVDKLTADNRVFHKACFRCHHCKGTLKLSNYNSFEGVLYCKPHFDQLFKRTGSLDKSFEGTPKIAKPEKNLEEKPAAAKVSSMFGGTRDKCAGCQKTVYPTEKVTVNGTPYHKSCFKCCHGGCVISPSNYIAHEGKLYCKHHHVQLIKEKGNLSQLEGDNEKSATNGKINGEEVATET

SEQ ID NO: 31822 - protein, 196 aa, Glycine max
  Clone ID: TF_GmC1184_1.pep
MAFAGTTQKCMACDKTVYLVDKLTADNRVYHKACFRCHHCKGTLKLSNYNSFEGVLYCRPHFDQLFKRTGSLDKSFEGTPKIAKPEKTGEEKPAATKVSSMFGGTRDKCAGCQKTVYPTEKVTVNGTPYHKSCFKCTHGGCVISPSNYIAHEGKLYCKHHHVQLIKEKGNLSQLEGDHEKSAEQEKINGEVVAAET

SEQ ID NO: 31823 - protein, 526 aa, Glycine max
  Clone ID: TF_GmC1928_1.pep
MGWFTKLLKGSNRKSSGGRYHGKYEDDRISDNLDCSADDLMDIEKEEIGRAIALSLSEADKKGKKVIEDDSESEDDELCPLSDEEAESVGEVQQDEDDHHAKIQQDEDKHLDEVQLEEDEQLARAIQESLSISSPPRSETDSLFQPFAHLFPPVYRICSGCNAEIGHGRFLSCMGGYWHPECFCCHACKLPITDYEFSMSGNRRYHKSCYKELHHPRCDVCKNFIPPNSAGLIEYRAHPFWLQKYCPSHERDGTPRCCSCQRLESVDTKYLLLDDGRKLCLECLDSAIMDTHECQPLYVEIQEFYEGLHMKIEQQVPMLLVERQALNEAMEGEKNGHHHLPETRGLCLSEEQTVPTILRRPRIGAGYQLIDMITEPFRLVRRCEVTAILVLYGLPRLLTGSILAHEMMHAWLRLKGYGNLRPEVEEGICQVLAHMWLESEIIPGTGDEGASSSSSSSSSSPSSSSSSKKGKRSDFEKKLGKYFKHQIESDSSAAYGDGFREGNQAVAKYGLRRTLDHIRLTGSFPY

SEQ ID NO: 31824 - protein, 85 aa, Glycine max
  unsure (1)..(85): unsure at all Xaa locations
  Clone ID: TF_700681638H1.pep
SSAFAGTREKCXGXQXTTVYPTERVTVNNTMXHKSCFKCCHGGCTISPSNYIAHXGKLYCKHHHIQLIKEXRGTSASLRMTTEDI

SEQ ID NO: 31825 - protein, 192 aa, Glycine max
  unsure (1)..(192): unsure at all Xaa locations
  Clone ID: TF_jC-gmst02400027e04a1.pep
MMASFAGTTQKCKACEKTVYLVDQLTADNKIYHKSCFRCYHCKGTLKLSNYCSFEGVLYCKPHFDQLFKKTGSLDKSFEGIPRTARLERSTDQVQTNSKVSNLFAGTQEKCVACKKTVYPIEKVAVDGTSYHKACFRCTHGXCVISPSNYVAHEHRLYCRHHHTQLFKQKGNFSQLDKQENDGGVTEKHITE

SEQ ID NO: 31826 - protein, 179 aa, Glycine max
  Clone ID: TF_GmC1463_1.pep
MASFGGTTQKCMACAKTVYLVDKLTADSRVYHKACFRCHHCRNTLKLSNYCSFEGVLYCRPHYDQLYKRTGSLDKSFEGIPKIQKPEKPVTGNENTKVLANVFLGTRDKCVCCNKTVYPTERVTVNGTPYHKGCFKCTYGGCTVSSSNFITHEGKPYCKHHHIQLFKEKGNYSQLENEC

SEQ ID NO: 31827 - protein, 74 aa, Glycine max
  Clone ID: TF_LIB3049-029-Q1-E1-G6.pep
RSPIQNNHSLNIRSKMSAAEEAKVPAVEKPVEEVKAPKLAKEKKPKAPKEKKPKQAKTASHPPYLQVISRKFLS

SEQ ID NO: 31828 - protein, 298 aa, Glycine max
  Clone ID: TF_GmC6822_1.pep
MGAPKQKWTAEEEAALKAGVVKHGAGKWRTILTDPEFSSILRMRSNVDLKDKWRNINVTAIWGSRQKAKLALKKNLLPSTKIDNNHLALSTVVQRDKEVANPKPLAVSSGTSPNSKEKISKLQNFQLDNLILESIIKLKEPRGSDQAAIAAYIEDQYCSTPTLRKLLSTKLKHMVASGKLMKVKHKYRIATNLTISEKRRCSSLLLLEGRPKDSPKAEKTGVNILSKSEIDAELSKMKGVTPQEAAAAAAKAVAEAEAAIAEAEAAAREADAAEAEAEAARVFAKAAMKALKCKTLRI

SEQ ID NO: 31829 - protein, 66 aa, Glycine max
  unsure (1)..(66): unsure at all Xaa locations
  Clone ID: TF_LIB3055-003-Q1-N1-D4.pep
SRRPFYHPTLTGCNGALAILKERTGSSHYAITNFIXGRPKELPPTYKKLVLVHLKKSVVAGKLVKV

SEQ ID NO: 31830 - protein, 106 aa, Glycine max
  unsure (1)..(106): unsure at all Xaa locations
  Clone ID: TF_LIB3167-016-P1-K1-F5.pep
KTGATHASALSEFLSISCFNFNNGYSFCGVSFNHAVVXSTASQPKAKKTASSKKPLSHPPFAVMIAHAIASLKERTVSSQYSNTKYIEGXHNELPATYKNLVLVHL

SEQ ID NO: 31831 - protein, 105 aa, Glycine max
  Clone ID: TF_jC-gmst02400046d07a1.pep
PSDTWPQKSPLAGRDPIPSLTESILPRTRRRRPNLEAKAKKTKEPKPNKALRPGHPPTQPIYEKIVKDANTSLKEKTGASQYTIAKFIQGKHMHDTPDLMKQKLY

SEQ ID NO: 31832 - protein, 255 aa, Glycine max
  unsure (1)..(255): unsure at all Xaa locations
  Clone ID: TF_GmC13_1.pep
MGNQKQKWTQDEEDALIAGVEKHGPGKWKNILKDPQFAPFLTSRSNIDLKDKWRNLSVSNGAQGSKEKSRVPKLKALPAPPAPTATPQNAAPALQNAASDVTPPDASQNDQDAKNPPRYNAMIFEALSALKDSNGSDMNAIIKFMEQKXLQVNQNFRRALSTKLRRLVSQGKLEKVQNGYKVKKEASSGTKSPSPKPKDVRPPQPQQQSPASVLMTNDTIKEAADTAAYRVADAESKSYLAAEAVKEAEKNIIAG

SEQ ID NO: 31833 - protein, 97 aa, Glycine max
  Clone ID: TF_uC-gmflminsoy035f03b1.pep
MATEEPTGAGEPAPEPATAEPPPEEKEETKPEAKAKKTKEPKPKKGARPRNPPTHPNYEETGKEATTSLKEKTGSSQHANAKNTEEKHTQRPPNRKK

SEQ ID NO: 31834 - protein, 133 aa, Glycine max
  Clone ID: TF_LIB3108-006-Q1-K1-H9.pep
EAIASLKERTGSSQYAISKLMEDKHKAHLPANFKKLLLVQLRKLTAAGKLTKVKNSYKISAKPATAVKPKSAAAAPKAKPKSATAAAKAKLKPKSAAAKLKKAAVKPKRKSSAVKPKSKAAVVKSKAVAPKPK

SEQ ID NO: 31835 - protein, 176 aa, Glycine max
  Clone ID: TF_GmC1613_7.pep
MATEEVNKLQSLPPYPEMIVKALEALNEADGSSKSAISKYIETTYGELPDETVLGSHLNKMKESGELAFKQNNYMKADPNAPPKRGRGRPPKPKVPLPPGTVVSPPRPRGRPPKDPNAPPKSPKAKATPATGRPRGRPKKVARSPAVPSPTAVSTGRPRGRPPKVKPQLTEVSVES

SEQ ID NO: 31836 - protein, 197 aa, Glycine max
  Clone ID: TF_GmC101_2.pep
MSAAAEEANAPAVEKPVEEVKAPNPAKEKKPKAPKEKKPKQAKTASHPPYFQMIKEALIALNEKGGSSPYAIAKYMEEKHKAVLPANFKKILGLQLKNQAARGKLVKIKASYKLTEAAKKENTAKVTKANAEKKESRPKRSKTATAAAPKKTEAVKRAAKKVGPKKTKKVSTPAKPKQPKSIRSPTKRARKAAVAAA

SEQ ID NO: 31837 - protein, 192 aa, Glycine max
  Clone ID: TF_GmC101_1.pep
MSAAEEAKVPAVEKPVEEVKAPKLAKEKKPKAPKEKKPKQAKTASHPPYLQMIKDALIALNEKGGSSPYAIAKYMEEKHKAVLPANFKKILGLQLKNQAARGKLVKIKASYKLAEAAKKVKESTAKATKESRPKRNKIATAVAPKKTEAVKKPAKKVGPKKTKKVSTPAKPKQPRSIRSPTKRARKAAVAAA

SEQ ID NO: 31838 - protein, 158 aa, Glycine max
  unsure (1)..(158): unsure at all Xaa locations
  Clone ID: TF_LIB4165-011-R1-K1-A4.pep
TPSQXTPXPXXXPGRPTRPGKHKELPATYKKLVLVHLKKSVAAGKLVKVKNSFKLAPTKPAPVKAAAPKKPTKAATKPASKPKAATPKKKAVAKPKAKAAATTAKPKSKPAKVAAKKVAAKPAKKKTPVKAVKKPKSVVKKPKSVKSPAKKTKAKAKK

SEQ ID NO: 31839 - protein, 224 aa, Glycine max
  Clone ID: TF_GmC796_5.pep
MGAPKQKWTAEEEQALKAGVVKHGVGKWRTILKDPEFSGVLYLRSNVDLKDNWRNLSVMANGWSSREKSRLSVRRVHQVPRQDENSMAITPVVPSDEEIVDVKPLQVSRDIVHIPGPKRSNLSLDKLIMEAITSLKENGGSNKTAIAAFIEDQYWALPGLKSMLSAKLKFLTASGKLIKVNRKYRIAPIAAYSDRRRNSSVLYLEGRQKASMKIDRDETNILTR

SEQ ID NO: 31840 - protein, 383 aa, Glycine max
  Clone ID: TF_GmC137_2.pep
MAISFSPKHPPYDEMIYTAIGALKERDGSSKRAIGKYIEQVYKDLPPTHPALLTHHLNRLKSSALLVLVKKSYKLPGSHHLPALQPQKTRGRPPKPKPHPVWPAAALTDSPALLSAKRGPGRPKKIGVSPPGPRGRPPGTGRSKLPKRPGRPPKPKSVSAISSGLKRRPGRPPKAQSNVNVIPFAAPVAPGLPTVQPILPTASVPNGSPRPRGRPKKSFTAAGAPALSAVAGAARGRGRGRPRGVFPVVRPGRPQKLAVGRSKNPVRRPVGRPKGSTAAAITAHKAANEDLRKKLEHFQSKVKESLGTLKPYFNHESPVTAIAAIQELEVLSTLDLKAPLRDETQQQPPPLPQTQTQVYEQQYPQPQSQQLPQFFQPHTSAPS

SEQ ID NO: 31841 - protein, 216 aa, Glycine max
  Clone ID: TF_GmC1479_1.pep
CICTKIYYFVDLFFCFCQSGRNSAEKMSKANAKNKSPSTELHPPYFEMIADAISSLKDRTGSSQPAIAKFIEDKHSKVLPPNFRKLLSVQLKKLVKSEKLYKVKNSYKLSSATDKETQKNTETEPKQKVEKKKKKKKKVGEKIKRLSQVKTPETLKKKAPTKKDAAATKKKSASAVEGSGGGKVKCLSQVKTPEALKKKKPNLTPKPSRPNRNARK

SEQ ID NO: 31842 - protein, 493 aa, Glycine max
  Clone ID: TF_GmC206_1.pep
MEPSSISPPPAPPATAVPFPAEPNDHLPPPIPEPPSNHPPYAEMIYTAIEALKEKDGSSKRAIAKYIEQVYTQLPPNHSDLLTQHLNHLKSRGLLQMVKKSYALPRSVPVSVPGPAPTQGTSAVPAAVVAITTTPRPRGRPRKAQNPVQNSPLRSGPKRGRPPTKSILRARIAKRGQSSRHRGKKPGRPPTATTTDVSASAGPKRRPGRPPKNQSQPTLIPFAPAVSAASVDTEHVAASAETAPVDADAALGPRARGRPKKYADEMIAAGRGRGRGRGRGGGGRGRGRGRGELPAQPRKPGARPVGRPKKGSTSASTSQNAANEDLRRKLEHFQSKVKESLAVLKPHFNHESPVTAIAAIQELEVLGTMDLNVPLRDETLPHQVELPPPQPPVQQQQQPPQQQLQQPPQQPPQATPSTTTTAATATDISANISSISSAAVPPSPAFAAVPATAAAAATATATAIPAPGTASFPPTVSSLGIRPRLGRITWSSI

SEQ ID NO: 31843 - protein, 200 aa, Glycine max
  unsure (1)..(200): unsure at all Xaa locations
  Clone ID: TF_LIB4167-040-R1-K1-G8.pep
TRPPTSIPPPPGXTVPFTVEPSNHVTPADNTNTNHPPYDEMIYTAIGALKEKDGSSKRAIGKYMEQVYKDLPPTHSALLTHHLNRLKSAGLLILVKKSYKLQAQKPRGRPPKLKSQPNTELTWPALALNDNPALQSAKRGPGRPKKIAGPVGVSPGPMVPGRRGRPPGTGRSKLPKRPGRPPKPXSXVSPISSGLKRRSG

SEQ ID NO: 31844 - protein, 164 aa, Glycine max
  Clone ID: TF_GmC333_7.pep
MIAEAIASLKERTGSSQYAITKFIEGKHKELPPTYKKLVLVHLKKSVAAGKLVKVKNSFKLAPTKSAPVKAAAAPKKPTKAAAKPAAKPASKPKAAAPKKKAVAKPKAKAAATKPKAKPAKAAPKKVAAKPAKKTPVKAVKKPKSVVKKPKSVKSPAKKAKAKK

SEQ ID NO: 31845 - protein, 169 aa, Glycine max
  unsure (1)..(169): unsure at all Xaa locations
  Clone ID: TF_LIB4391-008-R1-K1-F5.pep
MSTAAQPKAKKTASSKKPLSHPTFAAVLPNYSLSIQFRNQLCLISFIVLXMIAEAIASLKERTGSSQYAITKFIEGKHKELPPTYKKLVLVHLKKSVAAGKLVKVKNSFKLAPTKSAPVKAAAAPKKPTKAAAKPAAKPASKPKAAAPKKKAXAKPKAKAAATKPKAKP

SEQ ID NO: 31846 - protein, 184 aa, Glycine max
  Clone ID: TF_GmC772_1.pep
MATGQVINKPPSLPPYPEMIREAIEALNEENGSNKSSISKYIESTYGGLPQAHKVLLNVHLAKMRESGVLVFWKNNYTKRDPNAPPRRGRGRPPKPKEPLPPGTVLSPPRPRGRPSKDPNDLQKPLKASVVGSGRPRGRPRKMAWPTGGLGEVSQASKAKPVTSNGRPRGRPPKVKAVFTEISV

SEQ ID NO: 31847 - protein, 302 aa, Glycine max
  Clone ID: TF_GmC1641_3.pep
MASEEPTVAVEPAPEPATAEPPPEEKEEPKPEAKAKKTKEPKPKKVSRPRNPPTHPSYEEMIKDAITSLKEKTGSSQHAIAKFIEEKHKQLPPNFRKLLLYHLKKLVAAGKLVKVKGSFKLPPTRPSASSSSSPAKKKKPAPAKPQPKPKPKPKPKPAAKAKDTKATKSKAPAKPKAAAKPKAKVPAKPKPAPKPKAAAAAASKPKPAAAKPKGTKPAAKPKPKPAAKTKAAAAKPAAKPKAKPAKASRTSTRTSPGKKAAPAAKPAAKKVAPAKKAPVKSVKPKSVKSPAKKATAKRGGRK

SEQ ID NO: 31848 - protein, 525 aa, Glycine max
  Clone ID: TF_GmC206_2.pep
RSGFPGPSRVRVNPIQFPIFESTLYLSTMEPSSISPPPAPPATAVPFPAEPNDHLLPPISEPPSNHPPYAEMIYTAIEALKEKEGSSKRAIAKYIEQVYKEHLPPNHSILLTQHLTLLKSSGMLQMVKKSYALPRSVPLTGAAPAQAHDAATSALQLTSPRPRGRPRKAQIPVQNLPQDINVQVQQNAEPVWAALGLADEPVQTEGSSKKRGRPKKSVTPGAGPAKRGRPPGSGKRLGRPPKEKSVTATTTTDVSGPKRRPGRPPKNQSQPTPIPFAPADAAAAVGTEYVPRAETVPVDAAAALGPRARGRPKKYADEMVAAGRGRGRGRGRGGGGGRGRGRGRGQLPAQLRKSGARPVGRPKKGSTSASTSQNAANEDLRRKLEHFQSKVKESLAVLKPHFNHESPVTAIAAIQELEVLGTMDLNAPLRDETLPSQEEQPPLQQQQQPPQQQFPPPQQQPPQQHLAPQQLPPQPQAPIFQQTYPPFHLPQFHHHQPTLQFQQQPQPPQLFQHQAQPPSHQQFHP

SEQ ID NO: 31849 - protein, 271 aa, Glycine max
  Clone ID: TF_GmC796_2.pep
MGAPKQKWTAEEEQALKAGVVKHGVGKWRTILKDPEFSSVLYLRSNVDLKDKWRNLSVMANGWSSREKSRLSVRRVHQVPRQDENSMAITAVAPSDEEIVDVKPLQVSRDMVHIPGPKRSNLSLDKLIMEAITCLKENGGSNKTAIAAFIEVNRKYRIAPIAAYSDRRRNSSVLYLEGRQKASMKIDRDETNILTRSQIDLELEKIRSMTPQEAAAFAARAVAEAEAAIAEAEEAAKEAEAAEADAEAAQAFADATTKSAKGRKSPKRIHA

SEQ ID NO: 31850 - protein, 164 aa, Glycine max
  Clone ID: TF_GmC333_5.pep
MIAEAIASLKERTGSSQYAITKYIEGKHKELPATYKKLVLVHLKKSVAAGKLVKVKNSFKLAPTKPAPVKAAAPKKPTKAATKPASKPKAATPKKKAVAKPKAKAAATTAKPKSKPAKVAAKKVAAKPAKKKTPVKAVKKPKSVVKKPKSVKSPAKKTKAKAKK

SEQ ID NO: 31851 - protein, 297 aa, Glycine max
  Clone ID: TF_GmC1641_1.pep
MATEEPTVAVEPAPEPASADPPPEEKEETKPEAKAKKTKEPKPKKVSRPRNPPTHPSYEEMVKDAITSLKEKTGSSQYAIAKFIEEKHKQLPPNFKKLLLYHLKKLVAAGKLVKVKGSFKLPPTRPAASSSSSSSPAKKKKPAAAKSKPKPKPKPAAKAKDTKATKSKAPAKPKPAAKPKAKAPAKAKPAAKPKAAAAAKPKPAAAKPKAAKPAAKPKPAAKTKAVPAKPAAKPKAKPVKASRTSTRTSPGKKAAPAAKPAAKKVAVAAKKTPVKSVKPKSVKSPAKKATAKRGGRK

SEQ ID NO: 31852 - protein, 96 aa, Glycine max
  Clone ID: TF_LIB3108-022-Q1-K1-E10.pep
PSAKAPKKTSAPKKPAAHPPYIEMISEAISTLKERGGSSQYAISKFIEDKHKAHLTGNFKKLLLVQLRKSTAAGKLTKVKNSYKVAVKPAAAKKPT

SEQ ID NO: 31853 - protein, 60 aa, Glycine max
  Clone ID: TF_uC-gmroLIB3259P207c02b1.pep
MDPTSIPLSTATNIPFTVQPSNHVTLVYNSNTNTNHPPYDEMMYTAIGAIKEKDGSSKRA

SEQ ID NO: 31854 - protein, 176 aa, Glycine max
  Clone ID: TF_GmC1613_5.pep
MATEEVNKPQSLPPYPEMIVKALEALNEADGSNKSAISKYIETTYGELPDETVLGSHLNKMKESGELAFKQNNYMKADPNAPPKRGRGRPPKPKVPLPPGTVVSPPRPRGRPPKDPNAPPKSPKAKATPATGRPRGRPKKVARSPAVPSPTAVSTGRPRGRPPKVKPQLTEVSVES

SEQ ID NO: 31855 - protein, 176 aa, Glycine max
  Clone ID: TF_GmC1613_6.pep
MATEEVNKPQSLPPYPEMIVKALEALNEPNGSNKSAISKYIETTYGELPDATVLGSHLNKMKDSGELSFKQNNYMKADPNAPPKRGRGRPPKPKAPLPPGTVVSPPRPRGRPPKDPNAPPKSPKAKATPGSGRPRGRPKKVPRSPAVAAPTAVSSGRPRGRPPKVKPQLTEVSVES

SEQ ID NO: 31856 - protein, 176 aa, Glycine max
  Clone ID: TF_GmC1613_8.pep
MATEEVNKPQSLPPYPEMIVKALEALNEPNGSNKSAISKYIETTYGELPDATVLGSHLNKMKDSGELSFKQNNYMKADPNAPPKRGRGRPPKPKTPLPPGTVVSPPRPRGRPPKDPNAPPKSPKAKATPGSGRPRGRPKKVPRSPAVAAPTAVSSGRPRGRPPKVKPQLTEVSVES

SEQ ID NO: 31857 - protein, 86 aa, Glycine max
  Clone ID: TF_GmC333_1.pep
MVLQNDIDLLNPPVELEKRKHKLKRLVQSPNSFFMDVKCQGCFNITTVFSHSQTVVVCGNCQTVLCQPTGGRARLTEGCSFRKKGD

SEQ ID NO: 31858 - protein, 179 aa, Glycine max
  Clone ID: TF_GmC333_10.pep
MSTASQPKAKKTASSKKPLSHPPFAVMIAEAIASLKERTGSSQYAITKYIEGKHKELPATYKKLVLVHLKKSVAAGKLVKVKNSFKLAPTKSAPVKAAAAPKKPASKPKAAAPKKKAVAKPKAKAAATKPKAKPAKAAPKKVGAKPAKKTPVKAVKKPKSVVKKPKSVKSPAKKAKAKK

SEQ ID NO: 31859 - protein, 190 aa, Glycine max
  Clone ID: TF_GmC333_6.pep
MSTASQPKAKKTASSKKPLSHPPFAVMIAEAIASLKERTGSSQYAITKYIEGKHKELPATYKKLVLVHLKKSVAAGKLVKVKNSFKLAPTKPAPVKAAAPKKPTKAATKPASKPKAATPKKKAVAKPKAKAAATTAKPKSKPAKVAAKKVAAKPAKKKTPVKAVKKPKSVVKKPKSVKSPAKKTKAKAKK

SEQ ID NO: 31860 - protein, 411 aa, Glycine max
  unsure (1)..(411): unsure at all Xaa locations
  Clone ID: TF_GmC137_1.pep
MDPTSIPPPPATTVPFTVEPSNHVTPADNTNTNHPPYDEMIYTAIGALKEKDGSSKRAIGKYMEQVYKDLPPTHSALLTHHLNRLKSAGLLILVKKSYKLPGSDPLPVLQAQKPRGRPPKLKSQPNTELTWPALALNDNPALQSAKRGPGRPKKIAGPVGVSPGPMVPGRRGRPPGTGRSKLPKRPGRPPKPKSVSAISSGLKRRPGRPPKAESNVNVIPFAAPVAPGLPTVQPIVPTASVPNGSPRPRGRPKKIVAGAGAPALSSVGGAPRGRGRPRGVLPLVRPGRPQKLAVGRPKNPARRPVAPQGIDAITAHKAANDDLRXRKLEHFQSKVKESLGTLKPYFNHESPVTAIAAIQELEVLSTLDLKAPLRDETHQQPQPQTQVYEQQYPQPQSLQQQFFQPHTSAPS

SEQ ID NO: 31861 - protein, 103 aa, Glycine max
  unsure (1)..(103): unsure at all Xaa locations
  Clone ID: TF_GmC875_3.pep
MTVDEVDSSSEWSREQDKAFENALATHPEDDSDRWEKIAADVPGKTIEEIKQHYEXLLVEDINQIESXCVPLPSYNSSSEGXNSXCXDEGAGQKRQRPGHYSG

SEQ ID NO: 31862 - protein, 112 aa, Glycine max
  Clone ID: TF_LIB3170-061-Q1-K2-G10.pep
MAPTRKSRSVNKRMSSSNDNSPEKDGVNSNKSKQRKKKLTDKLGSQWSKEELERFYEAYKKYGKDWKKVAACVRNRSTEMVEALYSMNRAYLSLPEGTASVVGLIAMMTDHY

SEQ ID NO: 31863 - protein, 386 aa, Glycine max
  unsure (1)..(386): unsure at all Xaa locations
  Clone ID: TF_GmC5883_1.pep
MDAKDILGLPKNSFPSLEKKSRPPKESQRKPDGISREVYALTGGLASLMPAIEASQLKKKPLPLEKITWQWLPFTSSARKDNLHLYHWVRVINGVPPTGDYSFAKYNKSVDVIKYTDEEYDKYLSDPTWTKEETDQLFDLCERFDLRFIVIADRFPSSRTVEELKDRYYSVSRAILIARAPSSGDVVAHSIVKETYNVAQEMERKRALSMVLSRXATERAVPGETISPSNVQIPMAVPDNASTLATLRMLRLYLKIYALEQMVQAANASAGLRTIKRVEQTLQDLGVNLKPRVPTKAVCAEHLELRKEILTLXLNLQKQVQYKEAEGSSFRDGSYGETPGTPKDRTFVPDSTNFGVERVGKKDQKRKAPGAPSAHKRPRKLKASDL

SEQ ID NO: 31864 - protein, 246 aa, Glycine max
  unsure (1)..(246): unsure at all Xaa locations
  Clone ID: TF_GmC600_1.pep
QQILFPTLGRKKMVQQEIRRGPWTEQEDYKLVYFVNMFGDRRWDFIAKVSGLNRTGKSCRLRWVNYLHPDLKRGKLTPQEEHLVMDLXVKMSYWRTHMSKKNANEKKHASAASPVSSXCCQSSLSSNNHSCYDTGGYDDGMMMGLIGGEKGYSMDDIWKDIMSEEENNIYNNNLQPVYEGHSEEGCNFSCPPPPMIMPSPPSWDQYNISSQPLWVMDEEESNKMLFPTLSDQYFPYYEQGNAFLTG

SEQ ID NO: 31865 - protein, 433 aa, Glycine max
  unsure (1)..(433): unsure at all Xaa locations
  Clone ID: TF_GmC5883_2.pep
MDAKDILGLPKNSFPTLEKKSRPPKESQRKPDGISREVYALTGGLAPLMPATEASQLKKKPPPLEKITWQWLPFTSSARKDNLHLYHWVRVVNGVPPTGDYSFAKXNKSVDVIKYTDEEYDKYLTDPMWTKEETDQLFDLCERFDLRFIVIADRFPSSRTVEELKDRYYSVSRAILIARAPSSGDVVAHSIVKETYNFAQEMERKRALSMVLSQTRQQERRDEEVLVEAKXIAEKRLPPKVAGQSQFVASNAGAEAIERAVPGETVSPSNVQLPMVAPDNASTLASLRMLRVYLRTYALEQMVQAGNASAGLRTIKRVEQTLQDLGVNLKPMVPTKAVCAEHLELRKEILTPTRPQKQVQYKEAEGSSFRDGSYGETPGTPKHLHRGGDQDRTFIPDSMNFGVERVGKKDQKRKAPGAPSAHKRPRKLKASDL

SEQ ID NO: 31866 - protein, 141 aa, Glycine max
  unsure (1)..(141): unsure at all Xaa locations
  Clone ID: TF_uC-gmroLIB3258087c12a1.pep
LVCITLLSINRIEIYGKSCRLRWVKHLRPDFKRGHITPQEESIGLELHARWGNRXDLFSHSLEPACFHIMAAYIFQGLDCXTINFRWSAIARSLPGRTGNEIMIYWRTHFKEKAKSPYDAAEKARNRLMRKQQFHQPLLRQ

SEQ ID NO: 31867 - protein, 311 aa, Glycine max
  Clone ID: TF_GmC54235_1.pep
MEVAKDPNSQADSDSELELYTIPSSSRWFAWEEIHETERAAFKEYFDGSSISRSPKIYKEYRDFIINKYREEPSRRLTFSEVRKSLVGDVTFLHKVFLFLEHWALINYGTAEDVEEDHCKVRFEEGAPSGIRVAATPNSLKPMLLPRNGKSAANATGASLKLPPLASYSDVYGDLIRQKEGNCALCAHKCGSGHYRCTQDNFIICTNCFKSGNYGEKRSTEDFVLSESSENSGKHDTVWTEAETLLLLESVLKHGDDWELVAQSVQTKTKLDCISNLIELPIGELMLGPAHRNVNINDANGIVNNAKQSQS

SEQ ID NO: 31868 - protein, 385 aa, Glycine max
  Clone ID: TF_GmC794_2.pep
TAARRRQKGNYLRPDLKRGTFSQEEENLIIELHAVLGNRWSQIAAQLPGRTDNEIKNLWNSCLKKKLRQKGIDPVTHKPLSEVENGEKAAEVSNELNLLKSESSKSDSASYEQRTSISPKAYAPEMDGSCSSKIEINFVTNNNCYNKDLFLDRFMSSSRQESYTTSCQPSDLMGNFPIQMSYATNDQCLPNDSNSSHWFSQTGRSFDMNTEFPFNAAVTSINPTPTTNLFLPNNSFCYKPSLAVPSDNVSIPYGSHYWEASASNNSNSSTELRSSSPLNIFSSWGLADCGTSTTKEAQIHMMENHNTEEAKWDEYLHNPISMLASSVQNQAPESLCNDIKTSMHLVPDTLGAMLPHNHTKQQEQSQTSSFFSKDIQKLRAAFGHM

SEQ ID NO: 31869 - protein, 122 aa, Glycine max
  Clone ID: TF_GmC27273_1.pep
MEVEVPISLDLNNQLQPETVVSVQNGDPGVSSSVANAVNPQQPATKKPTRQWAAWTRQEEESFFTALRQVGKNFEKITSRVQSKNKDQVRHYYYRLVRRMNKLLGPGLCLDAKNSKDTNAAM

SEQ ID NO: 31870 - protein, 100 aa, Glycine max
  Clone ID: TF_GmC189152_1.pep
MASSSLSKQKASDSSWTPKQNKLFEKALAKYDKDTPERWQNVAKAVGGKSADEVKRHYEILLEDLRHIESGRVPLPKYKSTGSSTNVDEEERLLKYLKLN

SEQ ID NO: 31871 - protein, 93 aa, Glycine max
  Clone ID: TF_LIB5118-031-A1-PF1-A7.pep
MASSSMSATGSWSAKDNKAFERALAVYDKDTPDRWKDVARAVGGKTPDEVKSHYELLLRDISQIESGKVPYPNYKKSAEHDEEEKRMRNLKIQ

SEQ ID NO: 31872 - protein, 101 aa, Glycine max
  Clone ID: TF_LIB3242-689-P1-J1-D10.pep
MSTSKSVSGSSEADNQLGRGPWTVGDDHLLYQYIVKDGGGRSIMLSKHTRLKRTGTSSRSWRLNFLMPAMKRSNLTPQEQLIILELHSKLGNRFLSWALHS

SEQ ID NO: 31873 - protein, 247 aa, Glycine max
  unsure (1)..(247): unsure at all Xaa locations
  Clone ID: TF_GmC2603_1.pep
YSLLFRKKKMVQQEVRKGPWTEQEDFKLVSFVGLFGDRRXWDFIAKVSDLNRTGKSCRLRXWVNYLHPGLKRGKMTPQEERLVLELHSKWGNRWSRXARKLPGRTDNEIKNYWRTLMRKKAQDKKRGEAASSSSLRTGEESFYDTGGHGVTASTQDQGQKGEQGLFSMDDIWKDIDNMSEENNTLQPVYEGNSEEGCNFSCPPQVPSPSSWEYSSDPLWVMDEESLFCPLSEPYFSCYAQGSVFLTG

SEQ ID NO: 31874 - protein, 91 aa, Glycine max
  Clone ID: TF_GmC1001_1.pep
MASSQGWTPKQNKRFENALAIFDKDTPDRWHTVARAVGGKTVEEVKRHYEKLVEDVKKIEEGHVPLPNYRSAARGYGYMDEETRMKALSLQ

SEQ ID NO: 31875 - protein, 59 aa, Glycine max
  Clone ID: TF_LIB3242-279-Q1-J1-C3.pep
MIIRGSTILINLINFRWSKIAKHLPGRTDNEIKNFWRTRIQKHIKQAETSQQHGKFIRE

SEQ ID NO: 31876 - protein, 223 aa, Glycine max
  Clone ID: TF_GmC95896_1.pep
IIASQLPGRTDNDIKNYWNTKLKKKMMGVKMNPSALKKPHQVNLSSMLQNSTPSSPFTSLSFKNNHNNSYYYQPHLPFTGSESMTYSSLLSDNYSTFESLQNYQVSSVFMETSCSSSSDGSCNNNQINHVKEAELGYVGDGTFGDQIIGRLSYLNSGVEDQDTLKLVPSNAGRVSGVTDEETRLWGESPLEYGLEEIKQLISNSSCNNFMLDDSKTGEMVMYY

SEQ ID NO: 31877 - protein, 88 aa, Glycine max
  Clone ID: TF_LIB5118-020-A1-PF1-E1.pep
MDSDQGKLFIGGISWDTTEDKLKEHFGNYDDVLSTSVMREKNTGKPRGFGFVVFADPNILDRVMEDKHVIDGRTQVVWGGNLAVTNLG

SEQ ID NO: 31878 - protein, 42 aa, Glycine max
  Clone ID: TF_5263160.pep
INYLRPDVKRGNFTPEEEETIIRLHKALGNKWSKIASGLPGR

SEQ ID NO: 31879 - protein, 100 aa, Glycine max
  Clone ID: TF_GmC1227_3.pep
CYKTNSRAPKPQIETMTSKNNNDNLNNLSRERSSPDTCRRTHFPAIANRIEFRSETEKEENKRKSKNREVESIRRRREVLLKRNQKPNQKLLHTHSPESV

SEQ ID NO: 31880 - protein, 92 aa, Glycine max
  Clone ID: TF_GmC40008_1.pep
MASSSMSSTGSWSAKDNKAFERALAVYDKDTPDRWYNVAKAVGGGKTPEEVKRHYELLLRDVRHIESGQVPFPYKQNGGSQEEKRLRNMKLQ

SEQ ID NO: 31881 - protein, 145 aa, Glycine max
  Clone ID: TF_GmC119893_2.pep
EALEFHITEKRAKVHLELGAAFYDWNFDQVGEDVKLLWTEEEEKKFEDAIRSNPPSPETYFWDHIFRAFPTKSRADLVSYYFNVFILERRGYQNRHTPDDINSDDDDDEAGPLRNVFGHQTPNSGYQAPNPRGSILLTPKKSQTK

SEQ ID NO: 31882 - protein, 295 aa, Glycine max
  unsure (1)..(295): unsure at all Xaa locations
  Clone ID: TF_GmC1476_1.pep
MGAPKQKWTAEEEAALKAGVLKHGAGKWRTILTDPEFSAILHMRSNVDLKDKWRNINVTAIWGSRQKAKLALKRNLPAPKIDNNHMALSXLVRHDEFXDTKPIAVSGGPLQSPNLKEQISRLVDNHILEAIVNMKEQKGSDKVAIASFIELLXIEEKYRFPPNLSKLLPAKLKHMVASGKIIKEKHKYRIAPSSTVXTSEVLLQEKPKETAEVHKNDDVSMILKSQFYAEISKVKGLTAQEAAAAAAKAVAEAEAAIAQAEAAAREAEAAEAEAEAAQVFAKAAMKALKCKMLHI

SEQ ID NO: 31883 - protein, 54 aa, Glycine max
  Clone ID: TF_LIB3242-435-P1-K1-C6.pep
MRKPSCDIKKLNKGAWSKQEDQKLVDYIKKHGEVCWRTLPQAVRIYEFFFINKY

SEQ ID NO: 31884 - protein, 34 aa, Glycine max
  Clone ID: TF_jC-gmro02910037f03a1.pep
PPPFVVRPNRTGESCRLRWVNYLHPGLKRGKMTP

SEQ ID NO: 31885 - protein, 146 aa, Glycine max
  unsure (1)..(146): unsure at all Xaa locations
  Clone ID: TF_jC-gmXLIB3563P034be05a2.pep
MGTLSVCCLCYLYFVHVLCVCCCSTEQSFAYRLMGLSPCCDLIGLMIGPWTAAEDEILSTYLMNNGGHGSWRPLPRMAGLVRSGSSRRLRWSXYLTPALTVVPLLLQEXILCIQLHGLLGNAWAAVASHLPGRSDGEIXDLWNILL

SEQ ID NO: 31886 - protein, 63 aa, Glycine max
  Clone ID: TF_GmC739326_1.pep
VVSMASSSAWTTKQNKKFENALAIYDRDTPDRWQNLARAVGGKTVEEVKRHYEMLVDDLKRTR

SEQ ID NO: 31887 - protein, 123 aa, Glycine max
  Clone ID: TF_LIB3242-144-Q1-J1-B10.pep
MAPSRKSRSVNKRFSTVREAASSKDKITENASKNRLKKRKLADMLGPQWNKEELEHFYEAYRKYGKDWKKVALAVHNRSVEMVEALYTMNRAYLSLPEGTASVVGLIAMMTDHYSVLGGSDSG

SEQ ID NO: 31888 - protein, 87 aa, Glycine max
  Clone ID: TF_LIB3242-142-Q1-J1-C2.pep
MGAPKQKWTAEEEAALKAGVVKHGAGKWRTILTDPEFSSILRMRSNVDLKDKWRNINVTAIWGSRQKAKLALKKNLLPSPKIDHNHM

SEQ ID NO: 31889 - protein, 59 aa, Glycine max
  Clone ID: TF_LIB3242-179-Q1-J1-B9.pep
YIELLSYSFPARWSSIAKHLPKRTDNEIKNYWNSYLRKQFEKNAGDSSSPKPIISDSFP

SEQ ID NO: 31890 - protein, 92 aa, Glycine max
  Clone ID: TF_LIB3028-053-Q1-B1-G10.pep
VHEWKRIHEEESLQRWTLSDGHATHKKEKLYVYEIESRGPRNWSLIIRSIPGRSGNSCRLYWCTQLSPSGSRTRPSTTNPTTPLSRPHAPFG

SEQ ID NO: 31891 - protein, 74 aa, Glycine max
  Clone ID: TF_GmC126456_1.pep
MFLMKFVKCVNGCRWAAIASYLPQRTDNDIKNYWNTHLKKKLKKMQSGGDDDDNNGDKLNSCYSQNKGQWERRL

SEQ ID NO: 31892 - protein, 103 aa, Glycine max
  Clone ID: TF_LIB3242-051-Q1-J1-E9.pep
MASCSISASGSWSVKDNKAFEKALAVYDKDTPDRWYNVAHAVGGKTPEEVKKHYELLVQDVKHIESGRVPFPNYKITTSESTDQEEKRLRNWNWNLHDPPTPI

SEQ ID NO: 31893 - protein, 97 aa, Glycine max
  Clone ID: TF_GmC4605_1.pep
MASSSISASGSWSVKDNKAFEKALAVYDKDTPDRWYNVAHAVGGKTPEEVKRHYELLVQDVKHIESGRVPFPNYKKTTSGSTDQEEKRLRNLNLNLQ

SEQ ID NO: 31894 - protein, 506 aa, Glycine max
  Clone ID: TF_GmC21781_1.pep
KTTVISLLRFVTLFWRFWPFSVSNIRTNFSLSLFNSTLGGHEMDREEYLGKCSNMKCQRVQVDESYVHALQDEVMEVEHLLAEPRNDHASLDGSLDSHTTLNDKDDLELEVLDGLLDDVEIDDLEGTGGFAGACEEYFLDFGFADKFEEVLGSGPFEGSLLQISSSESHSSGLSGSSIVGGVLESTKVPIAKSECKNDSLDETITYEAHGAFRNNPSQPSKVNCRYNISLDIQHLQELENNRHLAAGILTCKKEKGPVEKGQPAVPREKRFRKPTQRYIEEFSNSRSKEKAPTAVTKTEYLSDSSCDVLHIRIKALKKSPSEKSSNENRDVMLPELQVHKGRPKKEKLEYDIESFPLESEDEWLTSKRSRRKDRRKHQKMWTLPEVLKLVEGISEYGVGRWTDIKRFLFSSTSYRTPIDLRDKWRNLLRASSAQKSTREAEQNDELALRPLPFNVVHRVQELAKIHPYPRERGSKRLRVSQAGSSVIAKDSPPLSLSKRNVRRKFT

SEQ ID NO: 31895 - protein, 239 aa, Glycine max
  Clone ID: TF_GmC341_1.pep
MDVKKGGSVVQAQVKLQKHNEKEMGMRKGPWAVEEDTILVNYIATHGEGHWNSVARYLSITGLRRSGKSCRLRWLNYLRPDVRRGNITLQEQILILDLHSRWGNRWSKIAQQLPGRTDNEIKNYWRTRVIKQAKQLKCDVNSKQFRDTLRYVWMPRLLERLQPTSQALEPNQSGLVLHASSSLLPSNSDHSIERGSDLWPGFNNQMLLEQGSGGDLLESLWDDDNMCFLQQLSYDLQMK

SEQ ID NO: 31896 - protein, 63 aa, Glycine max
  Clone ID: TF_LIB3242-739-P1-K1-D2.pep
MDDKKGGCAVQAQVKLQNHNEKEMGMRKGPWAVEEDTILVNYIATHGEGHWNFVARCAGMHAS

SEQ ID NO: 31897 - protein, 109 aa, Glycine max
  Clone ID: TF_GmC1498_1.pep
EARNRARQSLHPSLLVCIISGSSEGKDRSMSTTATTTSEEVSSNEWKVIHMSEQEEDLIRRMYKLVGDKWNLIAGRIPGRKAEEIERFWIMRHGDAFSVKRNGSKTQDS

SEQ ID NO: 31898 - protein, 85 aa, Glycine max
  Clone ID: TF_uC-gmflLIB3275P088h01b1.pep
RGNSILRTETRWVEWHGQKKKITCSRNAYNNMEKESGIVFLYWLVQLNSINLSLLLSFLSFQDIFCKGVLYKLKGDHLLMVQWLV

SEQ ID NO: 31899 - protein, 146 aa, Glycine max
  Clone ID: TF_GmC600_5.pep
PPHFVVGLNRTGKSCRLRWVNYLHPDLKRGKLTPQEQHLVMDLHSKWGNRWSRIARKLPGRTDNEIKNYWRTHMRKKKALEKKHASASASSPVCSSWESSLLANNHVVDSHASKESFYDTGGYDDMMMGLIGGEKGYSMDDIWKDI

SEQ ID NO: 31900 - protein, 136 aa, Glycine max
  Clone ID: TF_LIB5068-029-A1-XP1-E3.pep
IVDEFGNLFSWSLIASHLPGRTDNEIKNYWNSHLSRKIYTFHGKTTSKGIITLPPRRKRGRTSRWAMKNKNQKGSSSTQQQQQQIHHHLNNEVAVPLPPKPPLETEKYLSTNIILMEEQVDGSSTASTITNPGPAG

SEQ ID NO: 31901 - protein, 161 aa, Glycine max
  Clone ID: TF_15663951.pep
MRGIFLICLVENMGIARKCSYCGNLGHNARTCKSTPGQGQLKLFGVQLDVSSSPSSSNSFSSSSPSYSGMKRSFSTNYLLSSWASSSVPSSFSSPSLLGANENSDSYLLNANSLISTIQDTKKGVPWTEEEHRIFLIGLEKLGKGNWRGISKSFVTTRTPT

SEQ ID NO: 31902 - protein, 167 aa, Glycine max
  Clone ID: TF_GmC134810_1.pep
KRFTPEEDEKIKLAVFDYIESHGLGDEGLDMVLHCKSHPEIRDCWKEIGAALPQRPYVSVYTRAHILFERGEDRKWTPEEYEFLRKVKEQHGSDWKSVAEALGKHRFHVKDAWRRIKLTNTNQGRWTQEEYQNLFDLVNLDLRVRASQDYRKSKHGMLRDNIGWEAI

SEQ ID NO: 31903 - protein, 237 aa, Glycine max
  Clone ID: TF_GmC100_3.pep
RWSQIAARLPGRTDNEIKNFWNSTIKKRLKNMSSTTTTTSTSPNASETSISEPSNKDLNNMGGFISTLHNKHAGFVPMFGSSPSPSMMQTSTVFNNMIERFPMLEQGLINMPASGGYFEGTGSTPCFSQCEVHNNKGSCYLENEVFESVNIGVEGDMFVPPLENVTCKREETTNSSYFDDDINSILNNCNNIGIAENKAHHGVENLFQQELATATGEWDFEELMKDVSSFPFLDFSY

SEQ ID NO: 31904 - protein, 53 aa, Glycine max
  Clone ID: TF_LIB3030-010-Q1-B1-A6.pep
MGRPPCCDKVGIKKGPWTPEEDIILVSYIQEHGPGNWRSVPTNTGLSRCSKSC

SEQ ID NO: 31905 - protein, 356 aa, Glycine max
  Clone ID: TF_GmC144_1.pep
MTRRCSHCSNNGHNSRTCPSRGGGGVKLFGVRLTDGSIIKKSASMGNLNLSSAAAHHQFHSSPSSSNLAAAPSSPNPSSPCSDPPQGYLSDDPAHVSTFANRRGDRKKGVPWTEEEHRLFLIGLQKLGKGDWRGIARNFVVSRTPTQVASHAQKYFIRQSHATRRKRRSSLFDMVPDMSSDQPSVPEEQVLLPPSQNSQPCNGKSQPSLNLSLKSEFEPMETTSQENAQQTNETMMGSIGLTPMAPHGFFPAYLPVPFPMWPSTVAPPFEEVKGGETSHHQIHKPIPVIPKEPVNVDELVGMSHLSIGEAKVRDREPSPLSLKLLGEPSRQSAFHANAPVGTSDLNNGKDNAIQAV

SEQ ID NO: 31906 - protein, 360 aa, Glycine max
  Clone ID: TF_GmC144_2.pep
MTRRCSHCTNNGHNSRTCPSRGGGGVKLFGVRLTDGSIIKKSASMGNLNLSSSSSSAAAAHLQFRSSPSSSNLPAASSPNPSSPCSDPPQGYLSDDPAHVSTFANRRGDRKKGVPWTEEEHRLFLIGLQKLGKGDWRGIARNFVVSRTPTQVASHAQKYFIRQSHATRRKRRSSLFDMVPDMSSDQPSVPEEQVLLPPPENSQPCNGKSQPSLNLSLKSEFEPMETTSQENVQQTNEPMMGSNRLTPMAPHGCFPAYLPVPFPVWPSTWVHPFEEVKGGETCHHQIHKPIPVIPKEPVNVDELVGMSHLSIGEAQVRDREPSPLSIKLLGEPSRQSAFHANVPVGSSDLNNGKDNAIQAV

SEQ ID NO: 31907 - protein, 187 aa, Glycine max
  unsure (1)..(187): unsure at all Xaa locations
  Clone ID: TF_GmC84_5.pep
DQIESTRSTIFGSASNIHSRLEKQSENVAHIPSVGNNQTPKVRKPYTITKQREKWTEEEHQKFLEALKLYGRGWRQIEEHIGTKNAVQIRSHAQKFFSKVVRESEGSAESSIQPINIPPPRPKRKPLHPYPRKSVNSFKGHCIPNETEISXSTNLLVAENDTPSXNLVLSTXGSEAFGSQFQSRLTD

SEQ ID NO: 31908 - protein, 101 aa, Glycine max
  Clone ID: TF_LIB3030-004-Q1-B1-D11.pep
MSTSKSVSSSSEDDNELRRGPWTLEEDNLLSQYIFNHGEGRWNLLAKRSGLKRTGKSCRLRWLNYLKPDVKRGNLTPQEQLIILELHSKWGNRCLSCAFDS

SEQ ID NO: 31909 - protein, 98 aa, Glycine max
  Clone ID: TF_LIB3242-524-P1-J1-D7.pep
AGEDTRTCPRGHWRPAEDEKLRQLVEQYGAQNWNSIAEKLQGRSGKSCRLRWFNQLDPRINRRPFTEEEEERLLAAHRIHGNKWALIARLFPGRTDNA

SEQ ID NO: 31910 - protein, 316 aa, Glycine max
  Clone ID: TF_GmC1445_1.pep
MGRTPCCDKKGLKKGPWTAEEDEILSSYIKKNGGHGSWRSLPRMAGLLRCGKSCRLRWTNYLRPDIKRGPFTLEEEKLVIQLHGILGNRWAAIASQLPGRTDNEIKNLWNTHLKKRLKSMGLDPKTHEPLASSTYPFHKAPASVSTRHMAQWESARLEAEARLSNESSRFSHNTTNNSNSDNNKTTDSDYFLRIWNSEVGEAFRNVHHHKADDDNNNNKITTNTPTSSCHSPLSTGSSSNKCESIATNADLASNAPEIITPSSIVKQEFEWGTRGSDSSSSNDMEDSSDTALQLLLDFPINNDMSFLEGNSFVCPL

SEQ ID NO: 31911 - protein, 189 aa, Glycine max
  unsure (1)..(189): unsure at all Xaa locations
  Clone ID: TF_GmC1187_1.pep
MDKKQQCKTSQDPEVRKGPWTMEEDLILMNYIANHGEGVWNSLAKAAGLKRNGKSCRLRWLNYLRPDVRRGNITPEEQLLIMELHAKWGNRWSKIAKHLPGRTDNEIKNYWRTRIQKHIKQAENFQQXKVSTMAQPMETYSPPSYQGMLDPFSIQFPTNPHHSSCCTNDDDNNNYWSMEDIWSMQLANY

SEQ ID NO: 31912 - protein, 246 aa, Glycine max
  Clone ID: TF_GmC4565_1.pep
MGRSPCCEKAHTNKGAWTKEEDDRLISYIRAHGEGCWRSLPKAAGLLRCGKSCRLRWINYLRPDLKRGNFTEEEDELIIKLHSLLGNKWSLIAGRLPGRTDNEIKNYWNTHIRRKLLNRGIDPATHRPLNEAATAATVTTNISFGKQEQQETSSSNGSVVKGSILERCPDLNLELTISPPRQQQQTQKNLCFVCSLGLHNSKDCSCNVSNAVTVNNTTPSSAAAAAYDFLGMKTSGVWDCTRLEMK

SEQ ID NO: 31913 - protein, 218 aa, Glycine max
  Clone ID: TF_GmC6713_2.pep
MVSVNPSPAQGFYFFDPSNMVLPGVNNLPPPPPPAPPSHAAVEDPSKKIRKPYTITKSRESWTEREHDKFLEALQLFDRDWKKIEAFVGSKTVIQIRSHAQKYFLKVQKKGTSEHVPPPRPKRKAARPYPQKAPKTPTVSQVMGPLQSSSSFIEPAYIYIPDSSSALGTPVTNMPSSSWNYNNTPQSVNVPQVTRDDMGFTVAGQTAPLNCCCSSSNE

SEQ ID NO: 31914 - protein, 63 aa, Glycine max
  unsure (1)..(63): unsure at all Xaa locations
  Clone ID: TF_700907805H1.pep
MGXAPCCDKSNVKRGPWSPDEDATLKNYXEKHGTGGNWIALPKKAGLKRCGKSCRLRWLNYLR

SEQ ID NO: 31915 - protein, 460 aa, Glycine max
  Clone ID: TF_GmC5903_2.pep
AQEDETLRNAVAVFKGKSWKKIAEFFPDRSEVQCLHRWQKVLNPELVKGPWTQEEDDKIVELVSKYGPTKWSLIAKSLPGRIGKQCRERWHNHLNPDIKKDAWTLEEELALMNAHRIHGNKWAEIAKVLHGRTDNAIKNHWNSSLKKKLDFYLATGRLPPIPKNSPQVPVKDTIRRSASKSMLGCSNKELNAAVETSSETTAISKLDDSGRNQFESSGTVREVGDSSSVPANDSADSDCVECKPGSSNINPSCSNSEHVSRANFGTTFGPISENSGLNGNSTFEHFPIDSLYLNYTCQQNEYCPSPTMSPTGFFTPPRAKGSELCTETPESILRKAANTFPNTPSILRRRRTGAQTLTSPTKVLKVDNNPHTSNKTERTNDDSGSGHFSGSPASHGYGIGIPNNKAFNASPPYRLRSKRTAIVKSVEKQLEFAFDKEKNDDKRSNVMTEDRLHEKKLVVT

SEQ ID NO: 31916 - protein, 240 aa, Glycine max
  Clone ID: TF_GmC95395_1.pep
MEDSSAGEDTKTCPRGHWRPAEDEKLRQLVEQYGAQNWNSIAEKLQGRSGKSCRLRWFNQLDPRINRRPFTEEEEERLLAAHRIHGNKWALIARLFPGRTDNAVKNHWHVIMARKQREQSKLCGKRSFQDVYNDSNNTFLEKRTTPQSHHQDMLFSTRFGLENGIFFDFRSLDKNKDDSNNNNHRIVSDTPSSTSLASWNFGSVPTTTTKGARDNFNNTSRSSSVYLSECSRSSDRSFLY

SEQ ID NO: 31917 - protein, 237 aa, Glycine max
  Clone ID: TF_GmC937_3.pep
MERSSEEEMLITKGPWTEQEDSLLFNYITVHGEGHWNSVARYTGLKRTGKSCRLRWLNYLRPNVRRGNITLQEQLLILDLHSRWGNRWSKIAEHLPGRTDNEIKNYWRTRVVKQAKQLKCDVNSKQFRDTLRFVWMPRMLERIRAQASSSAQAHQSSLISNSNTQAHSGLLSSALHAHAPSLSDSSASYNLMGADAGSCSSHSYYSDIAGNGFGGADLWTDQNICFLQHQLAHHDLF

SEQ ID NO: 31918 - protein, 418 aa, Glycine max
  Clone ID: TF_GmC495_1.pep
MGRTPCCSHEELRKGAWTVQEDQKLITYIQKHGTGSWRTLPQKAGLKRCGKSCRLRWFNYLRPDIKRGKLSQEEEQTIIKLRAVLGNRWSSIAKHLPMRTDNEIKNYWNSYLKKQFEKNAVDPSSSKPNSTDSSSESKSNDTCMVPSEKTDCHEPNTSQSHQHNLSRSISSSTHLLNKVASKILASGYLELIKSCQPVVAGNSKSESVVKTGIGLESDNIRDPLEPNLTSPSHSITSAKLLNKMATSLPHKVHGLEAAKAVFSKLMENSEKGATASDDSFVGGCLNALSPFEDKPHITKTIDSPSGPTLMFNHVTTPSCFSEDNEDNWQCVSSNYVSFKICAANGGDCSVSEINLGESSSSTSSFLFENADLGTCDDEISKYIQYCREKNLWTSNANNVGITRPYDVRGRYLKRDNIS

SEQ ID NO: 31919 - protein, 326 aa, Glycine max
  Clone ID: TF_GmC5000_1.pep
MGRMPCCEKVGLNKGPWKTEEDEKLVAYVERHGPGNWRSVPAKAGLQRCGKSCRLRWINYLNPNIKRGSFSLEEHRTIVQLHSLLGNKWSIIAAHLPKRTDNDIKNYWNTNIKKGLIGKGLDPLTYKPIKSNTFQAYGGNFLDPSIDTTNMNHVAQSESAQIEAEARESMLQFGSLPSHLPGLILSKIPTQPFPSSASLLTQRINTTYDMYALVLATNHLDLHPPPFTDPESFPSRKLLPSVSTSVGQSTDPESSLSYDGIGYNMIDNSSSQMQMTMECYATNFEDDDVMIALEAFGIARFEGIQELFDGHTTIEVLINESFERDV

SEQ ID NO: 31920 - protein, 334 aa, Glycine max
  Clone ID: TF_GmC146_1.pep
MGRPPCCDKEGVKKGPWTPEEDIILVSYIQEHGPGNWRAVPAKTGLSRCSKSCRLRWTNYLRPGIKRGNFTEQEEKMIIHLQDLLGNRWAAIASYLPQRTDNDIKNYWNTHLRKKLKKMQVGCEGGSFGEGFSASRQIPRGQWERRLQTDIQMAKRALSEALSPEKPSCNLSASNSNPSDSSSSFSSTKPTTTQTVCYASSADNIARMLKGWMKNPPKSSRTNSSSVTQNSFNNFAAAGADTASSIGAKGPPSSAELSENNFESLFDFDQSLESSNSDEFSRSLSPEATVLQDESKPDVIGAEIMPFSLLEKWLLDEAGCQEKLVGCGDDAKFF

SEQ ID NO: 31921 - protein, 88 aa, Glycine max
  Clone ID: TF_GmC16783_1.pep
MSGKPLNSPRLLAMADSDLSSSQISTHSTDSGNRGSSKVEFSEDEETLIIRMYKLVGERWSIIAGRIPGRTAEEIEKYWTSRFSGSSE

SEQ ID NO: 31922 - protein, 88 aa, Glycine max
  unsure (1)..(88): unsure at all Xaa locations
  Clone ID: TF_GmC1167_2.pep
MGRPPCCDKVGIKKGPWTPEEDIILVSYIQEHGPGNWRSVPTXKGLSRCSKSCRLRWTNYLRPGIKRGNFTPHEEGMIIHLQALLGNK

SEQ ID NO: 31923 - protein, 209 aa, Glycine max
  Clone ID: TF_GmC744396_1.pep
MGRAPCCDKANVKKGPWSPVGDAALWAVFESSGTAGLWVALPQFAGLKRCGKSCRLRWLNYLRPNIKHGGFTEEEDNIICSLYISIGSRWSIIAAQLPGRTDNDIKNYWNTRLKKKLLGRRKQSNLSAKDTNNGIEENSYSNALSSSALERLQLHMQLQSLQNPFSFYNNPALWPKLHPFQEKMIQSLQSLNDGSSPVMQNALPNSHMS

SEQ ID NO: 31924 - protein, 326 aa, Glycine max
  Clone ID: TF_GmC1872_2.pep
MGRAPCCDKASVKRGPWSPEEDTKLKEYIEKHGTGGNWIALPQKAGLKRCGKSCRLRWLNYLRPNIKHGDFSDEEDRIICSLYVNIGSRWSIIAAQLPGRTDNDIKNYWNTKLKKKLMGLLPLSHHRKQPSFPSSFTLQNPPLSPSAHQLYGEYCTYTPTTTTSFTSNIEPPFSLPSSNYASTSDITTSVSHPFYQNQDSMQCYYPIMRDNSSNNNNNMLMFGSEGSCSTSSDGSCTQGREIIKQEERIGYHSYNNDYNFMLNHSNNINDGEKSCFGEWFSQTLLTPLDYDLEDIKQLISSSSSTTIFNNVDENKTEEKAMYYYYY

SEQ ID NO: 31925 - protein, 302 aa, Glycine max
  Clone ID: TF_GmC1514_1.pep
MGRAPCCDKANVKRGPWSPEEDATLKNYVETHGTGGNWIALPKKAGLRRCGKSCRLRWLNYLRPDIKHGGFTEEEDNIICTLYAEMGSRWSAIASKLPGRTDNDVKNYWNTKLKKKIMAGKVTLKTLTDNDTLPSISTPSLTNNQNVKTSQNSPFPSSQNQNSPPLDANNTFSISEKSIISFDQTHHGLYSPQVMDVVSQIGANSRIPNYNNNNNPVVSLSQEGSSSISDSSSIAMNNKNVSQPEQHANDDYESMEMLMDFGFGFPYDFANGPNCHYERVGELAPSSYPEWVDFSYADIKPH

SEQ ID NO: 31926 - protein, 119 aa, Glycine max
  Clone ID: TF_GmC140404_1.pep
MESQPLEKAKPKYRKGLWSPEEDNKLRNHIIKHGHGCWSSVPIKAGLQRNGKSCRLRWINYLRPGLKRGVFSKHEEDTIMVLHHMLGNKWSQIAQHLPGRTDNEIKNYWHSYLKKKEIK

SEQ ID NO: 31927 - protein, 308 aa, Glycine max
  Clone ID: TF_GmC1181_1.pep
MSTIAKRDLSSNEEESELRRGPWTLEEDSLLIHYIARHGEGRWNMLAKSAGLKRTGKSCRLRWLNYLKPDIKRGNLTPQEQLLILELHSKWGNRWSKIAQHLPGRTDNEIKNYWRTRIQKQARQLNIESGSKRFIDAVKCFWMPRLLQKMEQSNSPSPHHSSMTNMMNLGNSGEASMSSMSSSFNINPSMSSSSSPPQREFIMDDANHFNTMSNPINPSPDSFQFSQLLEISEHPKSPSNVFENNVCSYPIQDNCYVDTNNYGMEGINMDPLSAMDTYDFPQFDFQTAGNGWMLDSMGDSTLWNMEAM

SEQ ID NO: 31928 - protein, 220 aa, Glycine max
  Clone ID: TF_GmC1212_1.pep
MRKPCCDKENINKGAWSKQEDQKLIDYIQVHGEGCWRSIPKAAGLHRCGKSCRMRWLNYLRPGIKRGIFAEDEEDLIIKLHALLGNRWSLIAGRLPGRTDNEVKNYWNSHIRRKLIKMGIDPNSHKPHQSFPRPHVSSADHQGASTSESINNNKVPFFNSRGSAATDHHKISFTKEETSIISSPPLNLDLTISLPSPVEENKNSDHESAKTCDVDIDLNC

SEQ ID NO: 31929 - protein, 275 aa, Glycine max
  Clone ID: TF_GmC1729_1.pep
MVRAPCCEKMGLKKGPWAPEEDQILTSYIDKHGHGNWRALPKQAGLLRCGKSCRLRWINYLRPDIKRGNFTIEEEETIIKLHDMLGNRWSAIAAKLPGRTDNEIKNVWHTNLKKRLLKSDQSKSKPSSKRAIKPKIERSDSNSSIITQSEPDNFNFREMDTITSSACTTSSSDFSSVTVGDSKNIKSEDTESTETMPVIDESFWSEAAIDDETPTMSSSQSLTISNEMRLQYPFANYEETFQQGHHAYDSNFDDGMDFWYDIFTRTNDSIELLEF

SEQ ID NO: 31930 - protein, 274 aa, Glycine max
  Clone ID: TF_GmC1318_1.pep
MGRKANCDNQYAMNRGPWSAEEDKILMNYVQVHGEGKWRELSKRAGLKRCGKSCRLRWLNYLKPDIKRGNISSDEEDLIIRLHKLLGNRWSLIAGRLPGRTDNEIKNYWNTYLRKKAEHKHDKIPSHNDNIPIKLRIESPGCSKNSFGNVLDPTKSPHPMRCTKVMMPVNDSVNTTNLITTSWDNHNPSSASMQLDDYNHCLTGVLQEFDISDLLMSYEDDFRFNGYACVEIPQHIFEDETCRLDDSLGEEAWYENWKNDPYFPQDQDMGFSSF

SEQ ID NO: 31931 - protein, 108 aa, Glycine max
  Clone ID: TF_uC-gmroLIB3258087a02a1.pep
MYYCCCPLTGLKRNGKSCRLRWVNYLRPDLKRGQITPQEESIILELHARWGNRWSTIARSLPGRTDNEIKNYWRTHFKKKAKSPSDAAEKARNRLMRKQQFRQLRLQQ

SEQ ID NO: 31932 - protein, 304 aa, Glycine max
  Clone ID: TF_GmC203_1.pep
MVSKNPNPSEAFYLDPSGMSLPGILPFAAAATATADSFEDPAKKTRKPYTITKSRESWTEPEHDKFLEALQLFDRDWKKIEAFVGSKTVIQIRSHAQKYFLKVQKSGTNEHLPPPRPKRKAAHPYPQKASKTAPVLSQVSGSFQSSSALLEPGYILKHDSSAMPKTPIINTAVSSWSNNSLQKTTSVLHGQKQKVNNCCSSSRSPRAQLVGESNGQRNNSHPLRVLPDFAEVYSFIGSVFDPNVTGHVQKLKRMDPIDVETVLLLMRNLSINLASPDFEDHRRLLASYEVEPEVDKYKCRLNHA

SEQ ID NO: 31933 - protein, 77 aa, Glycine max
  Clone ID: TF_GmC6843_1.pep
NLTGVPWTEEEHRTFLVGLEKLGKGDWRGISRNYVTSRTPTQVASHAQKYFIRLATMNKKKRRSSLFDMVYIYIDPS

SEQ ID NO: 31934 - protein, 332 aa, Glycine max
  unsure (1)..(332): unsure at all Xaa locations
  Clone ID: TF_GmC6713_1.pep
MVSVNPNPAQGFYFFDPSNMTLPGVNNLPPPPPPAPAAPAAVEDPNKKIRKPYTITKSRESWTEQEHDKFLEALQLFDRDWKKIEAFVGSKTVIQIRSHAQKYFLKVQKNGTSEHVPPPRPKRKDAPPYPQKAPKTPTACHVMGPLLSSSIFIDCAYIYIYPAFFVLGWPASNMPLLRRLYNTTPQPGILLQVTRDDMGLTGAXQAAPLNCCVAAAEESTPPTWPRSKRINQGDQGKPIKVMPDFAQVYSFIGSVFDPNSTNHLQKLQQMDPINVETVLLLMTNLSVNLMSPEFEDHKRLLSSYDTDSDKSKFVNICSKSFTNKSESAVLSA

SEQ ID NO: 31935 - protein, 325 aa, Glycine max
  unsure (1)..(325): unsure at all Xaa locations
  Clone ID: TF_GmC1519_1.pep
MGHHSCCNQQKVKRGLWSPEEDEKLIRYITTHGYGCWSEVPEKAGLQRCGKSCRLRWINYLRPDIRRGRFTPEEEKLIISLHGVVGNRWAHIASHLPGRTDNEIKNYWNSWIKKKIRKPSTVTSSMTTTXVLIHQPQFNFNSNQLDHYGNQENLTAKPPMQETLFSSTCPLFMFDTSSLDQGTTTVDTTNNVRAELFQDSLGLSSSETWNMSHHQVHALPPQLAATFTATNVIDTTNYLPPLIENVENMVPNMEVQSCSIDEEGEMALECLRRQDLNEWVENQQQCPSFLFWDNINVEGQLRGEELAPNTSNMGNNTLSPFPSSL

SEQ ID NO: 31936 - protein, 157 aa, Glycine max
  Clone ID: TF_GmC1519_2.pep
MGHHSCCNQQKVKRGLWSPEEDEKLIRYITTHGYGCWSEVPEKAGLQRCGKSCRLRWINYLRPDIRRGRFTPEEEKLIISLHGVVGNRWAHIASHLPGRTDNEIKNYWNSWIKKKIRKTSSVSSTTIAQSIDHNSSDQFNYNSNLILYHFPNHDNNL

SEQ ID NO: 31937 - protein, 298 aa, Glycine max
  Clone ID: TF_GmC213_1.pep
DMDRIKGPWSPEEDEALQKLVEKHGPRNWSLISKSIPGRSGKSCRLRWCNQLSPQVEHRAFTAEEDDTIIRAHARFGNKWATIARLLHGRTDNAIKNHWNSTLKRKCSSTMIDDNTQPLKRSVSAGAAIPVSTGLYMNPPTPGSPSGSDVSESSLPVASSSHVFRPVPRTVKVLPPVETTSSSNDPPTSLSLSLPGVGVVDSSEVSNRTTEPIHVTPPLPHRSNTMPLLPMMTSVSATVMAPFNFSAEFRAVMQEMIRKEVRSYMELHNQNGMCFQAAVNDGFRNASVKRIGISRVDS

SEQ ID NO: 31938 - protein, 380 aa, Glycine max
  Clone ID: TF_GmC1582_1.pep
MAKSSTEKNGLKKGPWTPEEDQKLIDYIQKHGHGKWRTLPKNAGLKRCGKSCRLRWANYLRPDIKRGRFSFEEEEAIIQLHSVLGNKWSTIAANLPGRTDNEIKNYWNTHIKKKLLKMGIDPVTHTPRLDVIQLASILNTSLYNSAPQFNYPSLSGIGRSVINPSHMLGLLTTLLSCQNRNYNPDVLNNNQLSGGSTLLQNQHQCSRMQLDSTQAFQPNQPQVSLQENHIAKSNSNPLNMEPQVMKTTLENQITPIATPFSQQNTLPNLWHYNTEGHISDLPTMAQSSSAMQCFSSPKFNSIYNNLLENQNLCNNNEGMPNFNLSSLLSSTPSSSSPISTLNSSSSTTFVNGTTEDERDTYGSSMLMYNISNGLNDSGLL

SEQ ID NO: 31939 - protein, 197 aa, Glycine max
  unsure (1)..(197): unsure at all Xaa locations
  Clone ID: TF_GmC2603_2.pep
LVCVSYYCLPFRFKSNNGYFETCRWSRIARKLPGRTDNEIKNYWRTLMRKKAQDKKRGEAASSSSSSVDSSISSNNHAVDPHASKKAGEESFYDTGGHGVTASTQDQGQKGEQGLFSMDDIWKDIDNMSEENNTLQPVSVYEGHSEEGCNFSCPPQVPSPSSWEYSXDPLWVMDEESLFCPLSETIFFLLCTGHRFF

SEQ ID NO: 31940 - protein, 260 aa, Glycine max
  Clone ID: TF_GmC5898_1.pep
METMNVQVMRSLSDMVIKKGPWTEEEDSVLINYVNVHGEGHWNSLARSSGLKRTGKSCRLRWFNYLRPNVRRGNITLQEQLLILELHSHWGNRWAKIAEQLPGRTDNEIKNYWRTRVVKQAKQLKCHVNSKQFRDALRFVWMPRLMEQIQASSSSYGLDQTTLCNTQTHRDNSMVSSYSSEVDLQPPSLSDTSITSSSYNLIGDGGLSTESAEKGSIYSLWQHWDYSDIQAFEPCNGFGDADLWTDENMWFLQQHLADEL

SEQ ID NO: 31941 - protein, 110 aa, Glycine max
  Clone ID: TF_GmC148_2.pep
ILIHNSEYTGLLRCGKSCRLRWMNYLRPDIKRGNIAPEEDDLIIRMHSLLGNRWSLIAGRLPGRTDNEIKNYWNTHLSKKLKIQGTEDTDTHKMLENPQEEAASDGGNNN

SEQ ID NO: 31942 - protein, 279 aa, Glycine max
  unsure (1)..(279): unsure at all Xaa locations
  Clone ID: TF_GmC1382_1.pep
MGRAPCCSKVGLHRGPWTPREAFKYHVSSFFKIIFTNXSLPKTAGLLRCGKSCRLRWMNYLRPDIKRGNITPEEDDLIIRMHSLLGNRWSLIAGRLPGRTDNEIKNYWNTHLSKKLRNQGTDPNTHDKLTEAPEKKKGRKKNKQKSTENNKGSEKTLVYLPKPIRVKALSSCIPRTDSTLTLDSNSATTASTSQEKVQSPEAETKEVNMVWGVSDNIGDNGGIGIFFGEDHDLVNSASYMECYSDDHDTLEKLYEEYLQLLNVEEKPDELDSFAQSLLV

SEQ ID NO: 31943 - protein, 317 aa, Glycine max
  Clone ID: TF_GmC1121_2.pep
GPWSPEEDVILSRLVSKFGARNWSLIARGISGRSGKSCRLRWCNQLDPAVKRKPFTDEEDQMIVAAHAIHGNKWAAIARLLPGRTDNAIKNHWNSTLRRRGVGHDTIKLESGSFMEDVSLEKAKASSEDTLSCGDVSLKSSEGRDVSSMEIMDDKSDGKAQTEGQLHHEVKDPPTLFRPVARVSAFNVYHSFDGTQPSTSIPRSVSMQGPVLQSSKPDMEFYRALEGIFGDQSVPHQCGHGCCAAPNGRKSESSLLGPEFIEFSEPPSFPNFELAAIATDISNLAWLKSGLESSSVKIMGNTSGRVVSNGSQVHIGH

SEQ ID NO: 31944 - protein, 269 aa, Glycine max
  Clone ID: TF_GmC1225_2.pep
MGRQPCCDKLGVKKGPWTAEEDKKLINFILSNGQCCWRAVPKLAGLRRCGKSCRLRWTNYLRPDLKRGLLTQAEEQLVIDLHARLGNRWSKIAARLPGRTDNEIKNHWNTHIKKKLLKMGIDPVTHEPLNKQVSSKDSSSPAEHFSQVNNINIHQVEQNDGVLNSEENSTSSPAENSSGEESLLVDSICSDVSLINSMWLDETPLMDTLWDNTPKVENANNNMGLPIGEDNCAWLLDCQDFGIHDFGFNCFSEVETNVLQAIGMDRKGL

SEQ ID NO: 31945 - protein, 235 aa, Glycine max
  Clone ID: TF_GmC189_1.pep
MGRSPCCEKAHTNKGAWTKEEDHRLISYIRAHGEGCWRSLPKAAGLLRCGKSCRLRWINYLRPDLKRGNFSLEEDQLIIKLHSLLGNKWSLIAGRLPGRTDNEIKNYWNTHIRRKLLSRGIDPATHRPLNDSSHQEPAAVSAPPKHQESFHHERCPDLNLELTISPPHHPQPDHPHLKTLVTNSNLCFPCSLGLHNSKDCSCALHTSTANATATGYDFLALKTTVVLDYRTLHMK

SEQ ID NO: 31946 - protein, 117 aa, Glycine max
  unsure (1)..(117): unsure at all Xaa locations
  Clone ID: TF_GmC1295_1.pep
MGRAPCCDKANVKKGPWSPEEDETLKDYIEQHGTGGNWIALPQKVGLKRGGKSCRLRWLNYLRPNIKHGQFSDAEDKIICSLFASIGSXRWSIIASQLPGRTDNDIKNYWNTKLKKK

SEQ ID NO: 31947 - protein, 187 aa, Glycine max
  unsure (1)..(187): unsure at all Xaa locations
  Clone ID: TF_GmC2603_3.pep
MVQQEVRKGPWTEQEDFKLVSFVGLFGDRRWDFIAKVSGLKVAGESKIGIRQKKSNAYLGIMLQKNIDYGRRSLXPPHFVVGLNRTGKSCRLRWVNYLHPGLKRGKMTPQEERLVLELHSKWGNRWSRIARKLPGRTDNEIKNYWRTLMRKKAQEKKRGEAASSSPTPSSVDSSISSNNHAVDPHAK

SEQ ID NO: 31948 - protein, 212 aa, Glycine max
  Clone ID: TF_GmC861_1.pep
MKAMKRCSSSSSSSYSSASESTPQSNQNKNSNNFCYKIKGPWSAKEDRILTGLVEAHGPRNWASISRHIKGRSGKSCRLRWCNQLSPTVEHRPFSTREDEVILHAHARFGNKWATIARMLPGRTDNAVKNHWNATLKRRRFGADVVVEDDPLTALTLAPPGSGCCGRGEERRGVSPAGFWDAMRDVVAREVRGYVSSSFSDNLASNEGLSKY

SEQ ID NO: 31949 - protein, 296 aa, Glycine max
  Clone ID: TF_GmC875_1.pep
MTVDEIGSRYQWRKEQDKAFENALAIHPEDASDRWEKIAADVPGKTLEEIKHHYELLVEDVSQIESGYVPLPSYNSSPEGSTSHASEEGAGKKGGHSWNSNNESNHGTKASRSDQERRKGIAWTEDEHRLFLLGLEKYGKGDWRSISRNFVVTRTPTQVASHAQKYFIRLNSMNKDRRRSSIHDITSVNNGDVSAPQGPITGQTNGSADNSAGKSTKPAPPAPTAALGVGIYAGPTIGQPIGGPLVSAVGTPVMNLPPPAHMAYGLGAPVPGAVVPGAPMNLGPVPYPMPHTSARR

SEQ ID NO: 31950 - protein, 335 aa, Glycine max
  unsure (1)..(335): unsure at all Xaa locations
  Clone ID: TF_GmC1021_1.pep
DLAITPETIRQSXPKVNWNLMASLFVRGRSAAVRVSSRSYGGDPLINQGAWTNEEDKSLLLIVQDIGIRNWFDIATSLGTSRTPFQCLARFQRSLNPSMLNSEWTEEEDSQLCSAVASFGARDWQSVASVLERRTGTQCSNRWKKSLCPEKKGSFTREEDIRITVAVMLFGRKWNQIANYVPGRIQSQCRDRYLNCLDPSLKWGGWTEEEDLRLEAAVVKHGYCWSKIAEEVPPRTDSQCRKRWKVLCPEYVPLLQEARKKQRSIIGCNFVDRESERPAITLNDFLPLPVPAPKSDVGASNLRKKAKSSNVPKEMSKKCKKSSTSYQGSTRYRGI

SEQ ID NO: 31951 - protein, 560 aa, Glycine max
  Clone ID: TF_GmC5903_1.pep
MAEVVKSEECCQENKQSTAASCSSVSEGSGSAIHKSPGRCSPASTSPSHRRTTGPIRRAKGGWTAQEDETLRNAVAVFKGKSWKKIAEFFPDRSEVQCLHRWQKVLNPELVKGPWTQEEDDKIVELVSKYGPTKWSLIAKSLPGRIGKQCRERWHNHLNPDIKKDAWTLEEELALMNAHRIHGNKWAEIAKVLHGRTDNAIKNHWNSSLKKKLDFYLATGRLPPIPKNSPQVPVKDTIRRSASKSMLGCSNKELNAAVETSSETTAISKLDDSGRNQFESSGTVREVGDSSSVPANDSADSDCVECKPGSSNINPSCSNSEHVSRANFGTTFGPISENSGLNGNSTFEHCTNNGDRSSTRLIGTSSQENPTCGSLCYEPPQLDGSVPIDSLYLNYTCQQNEYCPSPTMSPTGFFTPPRAKGSELCTETPESILRKAANTFPNTPSILRRRRTGAQTLTSPTKVLKVDNNPHTSNKTERTNDDSGSGHFSGSPASHGYGIGIPNNKAFNASPPYRLRSKRTAIVKSVEKQLEYAFDKEKNDDKRSNVMTEDRLHETKLVVT

SEQ ID NO: 31952 - protein, 333 aa, Glycine max
  Clone ID: TF_GmC596_2.pep
MTRRCSHCSHNGHNSRTCPNRGVKLFGVRLTDGSIRKSASMGNLTHYAGSGSGPLHTGLNNPGSPGETPDHAAAVADGYLSEDFVPGSSSSSRERKKGVPWTEEEHRMFLLGLQKLGKGDWRGIARTYVISRTPTQVASHAQKYFIRQSNVSRRKRRSSLFDIVADEAADTAMVQQDFLSANQLPTETEGNNPLPAPPPLDEECESMDSTNSNDGEPAPSKPENTQSSYPMLYPAYYSPVFPFPLPYWSGYSPESTKKEETHEVLKPTAVHSKSPINVDELVGISKLSLGESIGDSGPSSLSRKLIEEGPSRQSAFHATPTCGSSNGSAIHAV

SEQ ID NO: 31953 - protein, 188 aa, Glycine max
  Clone ID: TF_GmC1812_2.pep
MCTSKSVSSSSEDDNELRRGPWTLEEDNSLSQYISSHGEGRWNLLAKRSGLKRTGKSCRLRWLNYLKPDVKRGNLTPQEQLIILELHSKWGNRWSKIAQNLPGRTDNEIKNYWRTRIQKQARHLKIDTDSREFQELVRRFWMPRLLQKAKESSSSAMSIQNQATPMPFDGVSQHSTVGTIPSHSHTPW

SEQ ID NO: 31954 - protein, 311 aa, Glycine max
  Clone ID: TF_GmC105_1.pep
MRLAMSTPSKSIICSSEDDYELRRGPWSVEEDYLLTHYIANHGEGRWNLLAIRSGLRRTGKSCRLRWLNYLKPNVKRGNLTSEEQLLIFELHSKWGNRWSKIAQQLPGRTDNEIKNYWRTRIQKQAIYAKFEDHRRAGFVEFVKGLQMTRCLHKSQESSPSAMSTQDQAIPLPFDGVTVPHYSSFGIGTTPTIQITCHGDLNHLNQHEQNSDSEHHNSSCISSSESANIPNMSQPFGYTTSQFQALDNCDFGMCLYDGYSIDNNSYDRDALNLTTTMVAGNLELPVFDCQTLETNRLNKEFASSTWSMDEL

SEQ ID NO: 31955 - protein, 201 aa, Glycine max
  Clone ID: TF_GmC1241_1.pep
MGVLSNMIDREQLKPGDHIYSWRQAYIYAHHGIYVGDGMVIHFTRGAGQEIGTGTVLDNLLFSSSPSHSSDTPCPRCGDQTRTDGVISSCLDCFLYGGNLYIFEYGVSPAFFLAKARGGTCTLAPSDPTEDVLHRSSFLLENGFGVYNIFKNNCEDFAIYCKTGLLVSTSVSVGRSGQAASYLAAASTLVSTPLRFMTTSF

SEQ ID NO: 31956 - protein, 222 aa, Glycine max
  Clone ID: TF_GmC1241_2.pep
MINCDGVFGLVIEGVPWTEEEHRLFLLGLHKVGKGDWRGISRNFVKTRTPTQVASHAQKYFLRRHNQNRRRRRSSLFDITTDTVMESSTIMEEEQVPQETMAAPIPAAYPPFPGAGFPMSLSPVVLPVSGERLTKPIRPTPIVPVPPSSKMANLNLKGKASRTNLIEPLPLSLNLPSPTPRSQDQSPANSGHSSPSSSSAAAFQAMSAAKFGGGGDSIISVA

SEQ ID NO: 31957 - protein, 168 aa, Glycine max
  Clone ID: TF_GmC1241_3.pep
MSRTCSQCGNNGHNSRTCTDGGAAASCGGSPRENGIMLFGVRVMTEANSSFRKSASMNNLSQYDAESNAADAGYASDDVVHASGRTRERKRGVPWTEEEHRLFLLGLHKVGKGDWRGISRNFVKTRTPTQVASHAQKYFLRRHNQNRRRRRSSLFDITTDTVMGIFYY

SEQ ID NO: 31958 - protein, 91 aa, Glycine max
  Clone ID: TF_GmC421653_1.pep
MDTISVQAMRSLSDSDSLSSATYASEEDMKIKKGPWTEEEDSVLINYVNFQGEGQWNSLARSACLKRTGKSCRLTWLNYLLPNVLRGNITL

SEQ ID NO: 31959 - protein, 106 aa, Glycine max
  unsure (1)..(106): unsure at all Xaa locations
  Clone ID: TF_GmC142751_2.pep
MGRAPCCDKNGLKKGPWTTEEDQKLIDYIQKNGYGNWRTLPKNAGLQRCGKSCRLRWTNYLRPDIKRGRFSFEEEETIMQLRFILGNKWTGIAXRFPGRIHDEIKN

SEQ ID NO: 31960 - protein, 364 aa, Glycine max
  Clone ID: TF_GmC850_1.pep
MGRAPCCDKANVKKGPWSPEEDAKLKSYIEKHGTGGNWIALPQKIGLKRCGKSCRLRWLNYLRPNLKHGGFSVEEDDIICSLYVSIGSRWSVIAAQLPGRTDNDIKNYWNTRLKKKLLGKHRREPRNRGNYNSVKQENDVNRGSGTTDGDSSSLSLLQENGSTTHHQEQHQQQPCWPQNINNMPVLPLQVPLPYKNQGPCFNDQDSLKKLLIKLGGRFSGDSYHPTLDGLNLEFSSHGQQIYQEQVHVGSSAACISATINNNNEVQFAQTGQYPGVDNLVQGQGGNFTPSFEEMVSSSNYPDGLEFLYNEGMIDHKIIDTTTTTTWGETSTPIYHHHDSLASTYQGQGVIQECVLQDFSYPRAQ

SEQ ID NO: 31961 - protein, 340 aa, Glycine max
  Clone ID: TF_GmC1872_1.pep
MGRAPCCDKANVKRGPWSPEEDSKLKDYIEKHGTGGNWIALPQKAGLKRCGKSCRLRWLNYLRPNIKHGEFSDEEDRIICSLYANIGSRWSIIAAQLPGRTDNDIKNYWNTKLKRKLMGLLPSSHQRIAPYQQFSSQNPSSFPSHSSLSSSQYRDYYYNSSHHYYIPAPTSSFTCLEPISAPSSNYTNTTTTSNSLSFYQHQEPLVSVSPRQYYPITDSSMLVFGSETSCSSSDGSCSQVSLGREIKQEDMGFQNFMFGDHQNMNKFMNINHDGGEEYVNQWTQRPNGYIFQTQQTALDYDLEVIKNLICSNSSSNSNNGYLSVDENKTEEKGVYYNYCN

SEQ ID NO: 31962 - protein, 226 aa, Glycine max
  Clone ID: TF_GmC482_1.pep
VFLNRMEATNRSSSSTSSSSDCCSSESNPNKPDRIKGPWSAEEDRILTGLVERYGPRNWSLISRYIKGRSGKSCRLRWCNQLSPAVEHRPFSAQEDDTIIAAHAQYGNRWATIARLLPGRTDNAVKNHWNSTLKRRAKGININVNHANNEVAASSSAPSRHFDFEDDPLTALTLAPPGIANGTVAEDAVPDHRASPEGFWDMMRDVIAREVREYVSSNFSDNSGFH

SEQ ID NO: 31963 - protein, 371 aa, Glycine max
  Clone ID: TF_GmC651_1.pep
MGRAPCCEKVGLKKGRWTAEEDEILAKYIQANGEGSWRSLPSLEGLLRCGKSCRLRWINYLRADLKRGNISAEEENTIVKLHASFGNRWSLIANHLPGRTDNEIKNYWNSHLSRKIYSFPGAGAGASAGIMDTPKVVYIPPKRKCGRTSRWAMKKNKTYTQKVNDRINQRHTQIGFPQQNSDTAVPTPPTPSLESEGLSNAVNDFKVLDGDVAEFDEPRTEELEAEVNKRDNSVGGVEESSNTDEDILGLCELEGINEDSGMLLGFSDILESCLAETTCGVWDISEERESNDVVAADACRDKIASSEEGSCSSMNQDWDWESVLEFSNAVDNWEDQDKLLTWLWEDDDCKRLGETDTQILQNDMVIDWFLS

SEQ ID NO: 31964 - protein, 293 aa, Glycine max
  Clone ID: TF_GmC1386_1.pep
MMRTPISSDESGLKKGPWSPEEDKILVDFIEKHGHGSWRALPRLAGLNRCGKSCRLRWTNYLRPDIKRGKFSDEEEQLIINLHSVLGNKWAAIASHLPGRTDNEIKNLWNTHLKKKLMQMGLDPVTHRPRTHHLNLLSNLQQILALIRLQSDANKLQLLQNIFEASNSDPLPDSSYSLLNDVLGGLNNLHSNDLHNLYDGNSLSVQNFDQNLNGGRNAEPSPSSNSLPNLVSASPDRSPVVKEAQNILVNSKDFSTSAFELTWGDFMDEEETNQTYWKGFMDQHSNQTWSTFP

SEQ ID NO: 31965 - protein, 301 aa, Glycine max
  Clone ID: TF_GmC1766_1.pep
MVSKNPNPPEGFYLDPSGGMPLPGMPPFASVSAATAANSPEDAAKKIRKPYTITKSRENWTEPEHDKFLEAIQLFDRDWKKIEAFVGSKSVIQIRREAQIYFLKVQKRGTSEHLPPPRPKRKAAHPYPQKASKNAPVLSQVSGRFQSSSALLEPGYILKNDAPPMLKTPIMNTVASSWSNNTLQTANLSPVTKVNNPCSSGESTPKVWPVGESNGQGNKIHPLRVLPDFTQVYGFIGSVFDPNATEHLQKLKKMDRIDVETVLLLMRNLSINLTSPDFEDHRKLLSSYEVEPERDDNYQRG

SEQ ID NO: 31966 - protein, 315 aa, Glycine max
  unsure (1)..(315): unsure at all Xaa locations
  Clone ID: TF_GmC205_1.pep
MGRSRVALRSADDDPNHRSKRKKAALNVENSETLPTGQGVTTSKVSLYHCNYCNKDISGKIRIKCAVCQDFDLCLECFSVGAEVTPHKSNHPYRIXDWNADEELLLLEGIETYGFGNWNEVAEYVGTKTKSQCIDHYNAVYMNSPCFPLPDLSHVMGKNKVELCAMAKGHEAKKEFSLTAELTLKEEALFTDRINYEESKNAEINNQTMSRLTSACGKAYPSTIKKASNVIQNNGGVKVEESRADWSIGEKKPKLSGEDRPSMTDLSGYSFKREEFDVEYDNDAEQVLADMEFKDTDTKAEYAMKLHVLHIYSKR

SEQ ID NO: 31967 - protein, 87 aa, Glycine max
  Clone ID: TF_LIB4198-004-Q1-K1-G1.pep
MGRPPCCDKGVKKGPWTPEEDIILVSYIQEHGPGNWKAVPANTGLSRCSKSCRLRWTNYLRPGIKRGNFTDQEEKMIIHLQALLGNR

SEQ ID NO: 31968 - protein, 223 aa, Glycine max
  Clone ID: TF_GmC1378_1.pep
KSCRLRWINYLRPDLKRGGFTEMEEDQIIQLHSCLGNRWSKIASHFPGRTDNEIKNHWNTKIKKRLKLLGLDPLTLKPSEQKEKSVDDKKNIELQPNTSKGSEQGVENKSLDMHSTREVPKTEGKIEENKVTWDDTTGFFNNYEMLCSQLDLGSWMSQETKTSTSSYCSSSFSLDDSSNLSVGESSYLQENSLQQWVDGLDSILSWDSFNPLEKDFLFLDNRQ

SEQ ID NO: 31969 - protein, 268 aa, Glycine max
  Clone ID: TF_GmC314_1.pep
MDRVKGPWSPEEDEALRRLVQAHGPRNWSVISKSVPGRSGKSCRLRWCNQLSPQVAHRPFSPDEDEAIVRAHARFGNKWATIARLLNNGRTDNAVKNHWNSTLKRKKCSAVSDDVTDRPPLKRSASVGPAHLNPGSPSGSDLSDPSLPALSNPSPSAHYRPNLMETASSACDPATSLSLSLPGFGSGSNPVCAPRPVSVSPPSPPPAEPVEQRGKQMFNAEFLRVMQEMIKKEVRSYMSGMEQKNGFRMQTEAIGNAVVKRMGISNIE

SEQ ID NO: 31970 - protein, 393 aa, Glycine max
  Clone ID: TF_GmC145_1.pep
MTEEDRSAQETVHNGVASTELGGEEMDIAEVTAAGRVKGPWSPEEDALLSRLVAQFGARNWSMIARGVPGRSGKSCRLRWCNQLDPCVKRKPFTEEEDSIIVSAHAIHGNKWAAIARLLPGRTDNAIKNHWNSTLKRRCMEMGRYVPAHADVMEDGTGSFDKTKASSEETMSIGDINSKNPAEVRNVMMDNENKPPTKDDAKVEEHPTLHRPVARVSAFSVYNTPGRSTMGSCSKMFPRQSPLIQSPKPDVGSCKLFDDIDCEPMVPSQCGHGCCTGDSRESHSHGSLLGPEFVDYLESPSSSHAFISIATDLNNIAWIKSGLENCSTGVTENTANLTASRGVASALQTNFLGQDLKNGYGQFEEGHGMFLGAMQEVLSTKMARQHYAMPAEV

SEQ ID NO: 31971 - protein, 112 aa, Glycine max
  unsure (1)..(112): unsure at all Xaa locations
  Clone ID: TF_GmC5794_1.pep
KFLGYPLDGLSQMAQERKKGVPWTEEQHRIFLVGLEKLGKGDWRGITRDEVLXNYPTTRGQPHVEVHAQNYFLRLEKIDKKNRRLSLFDLDGSNKVYSNSITDHHDNFSLNE

SEQ ID NO: 31972 - protein, 282 aa, Glycine max
  unsure (1)..(282): unsure at all Xaa locations
  Clone ID: TF_GmC900_1.pep
MVSLNLNPNPPQTFHFFDPFNMEDQNKKVRKPYTITKSRENWTDQEHDKFLEALHLFDRDWKKIEAFVGSKTVIQIRSHAQKYFMKVQKNGTSEHVPPPRPKRKAAHPYPQKASKNALTISQVARPLQSSSALSESSHIYRPDSSSVVRTPVRQCGXLPSWGYNVTPLVSLPRVTKDDMVLMSQQINPFSSSNENTPRGWPISKQTDQGDQGKPTIVMPDFAQVYSFIGTVFDPNAINHLQRLKQMDPINVKTILLLMRNLSTNLRSPEFENERRDAVIVLC

SEQ ID NO: 31973 - protein, 138 aa, Glycine max
  Clone ID: TF_GmC953290_1.pep
MGYQPLEKGKPKHKKGLWSPEEDNKLRNHILKHGHGCWSSVPIKAGLQRNGKSCRLRWINYLRPGLKRGKFSKQEEETILTLHHMLGNKWARMSQPLPAWSVFESFTFWRSLLRKRVALALAVESLDQVLSASSSSDT

SEQ ID NO: 31974 - protein, 332 aa, Glycine max
  unsure (1)..(332): unsure at all Xaa locations
  Clone ID: TF_GmC100_1.pep
MRKPEACNNNTKNNSNKKLRKGLWSPEEDDKLMNYXMLNHGQGCWSDVARNAGLQRCGKSCRLRWINYLRPDLKRGAFSPQEEELIIHFHSLLGNRWSQIAARLPGRTDNEIKNFWNSTIKKRLKNMSSTTTTTSTSPNASETSISEPSNKDLNNMGGFISTLHNKHAGFVPMFGSSPSPSMMQTSTVFNNMIERFPMLEQGLINMPASGGYFEGTGSTPCFSQCEVHNNKGSCYLENEVFESVNIGVEGDMFVPPLENVTCKREETTNSSYFDDDINSILNNCNNIGIAENKAHHGVENLFQQELATATGEWDFEELMKDVSSFPFLDFSY

SEQ ID NO: 31975 - protein, 195 aa, Glycine max
  Clone ID: TF_uC-gmflLIB3275P058b05b1.pep
PTRSGSGGSGGRSGGDQGGGNVEDVALKKGPWTTAEDAILTDYVTKHGEGNWNAVQRNTGLNRCGKSCRLRWANHLRPNLKKGAFSPEEEKIIVDLHSQFGNKWARMAALLPGRTDNEIKNYWNTRIKRRQRQGLPLYSDEHDHNHRSTTPTSTTTPSPCLTPTGSNPNIATSFEFFNQNQQQQQQYQHQYQYQT

SEQ ID NO: 31976 - protein, 429 aa, Glycine max
  Clone ID: TF_GmC6801_1.pep
MGRSPCCEKTGLKKGPWTPEEDQKLIAFIEKHGHGSWRALPAKARLRRCGKSCRLRWSNYLRPDIKRGKFSLQEEQTIIQLHALLGNRWSAIASHLPKRTDNEIKNYWNTHLKKRLDKMGIDLTTHKPKNESLAYSKDGSNLGHMAQWESARLEAEARLVRESKLQEQQNNLGPMSSPSSTQITRLVLNKITPLQQKQHSLPPCLDVLKAWQSSWSNNNNNINKYSSLNDKKKTMHVRSMYAMMLSNDDLESPTSTLCFPESVQMNNNNNNSNAMVSTDHLGLINENYLLPPTTLDEFIITKSLGTTSSEGAIETVNGGGSDSWRYFTKHNNEEEQVETDEKTIMYDTISCLQDDDGDIMVAVEALRGAGYYDDDNNSNNNNVTFTHLSSNVNNMVGFENDFDSNEDLAAVNLHVNFEENKDYWNGMLN

SEQ ID NO: 31977 - protein, 333 aa, Glycine max
  Clone ID: TF_GmC596_1.pep
MTRRCSHCSHNGHNSRTCPNRGVKLFGVRLTDGSIRKSASMGNLTHYAGSGSAPLHVGLNNPGSPGETPDHAAAAADGYASEDFVPGSSSSSRERKKGVPWTEEEHRMFLLGLQKLGKGDWRGIARNYVISRTPTQVASHAQKYFIRQSNVSRRKRRSSLFDIVADEAADTAMVQQDFLSANELPTETEGNNPLPAPPPLDEECESMDSTNSNDGEPAPSKPENTHPSYPMLYPAYYSPVFPFPLPYWSGYSPEPTKKEETHEVLKPTAVHSKSPINVDELVGISKLSLGESIGDSGPSTLSRKLIEEGPSRQSAFHATPTCGDMNGSAIHAV

SEQ ID NO: 31978 - protein, 133 aa, Glycine max
  Clone ID: TF_9565839.pep
MRTPSSSHKSGLNKGTWTPEEDAKLIAYITRYGSWNWRQLPRFAGLARCGKSCRLRWLNYLRPNIKRGNYTKEEEEIIIRLHEKLGNKYALTFQAKLNFPQHCTASKARQGNYKIFPYFNTYRPMHLAKSTHN

SEQ ID NO: 31979 - protein, 115 aa, Glycine max
  Clone ID: TF_jC-gmXLIB3563P067bd03a2.pep
MGRQPCCDKLGVKKGPWTAEEDKKLINFILSNGQCCWRAVPKLAGLRRCGKSCRLRWTNYLRPDLKRGLLTQAEEQLVIDLHARLGNRFSIFYLLGFQALPCVCSPEIITQFMTM

SEQ ID NO: 31980 - protein, 302 aa, Glycine max
  Clone ID: TF_GmC1277_1.pep
MSSSGTIWSYEEEKAFENAIAMHWIEESSKEQWEKIASAVPSKSMEDVKQHYQVLVEDVSAIEAGHISFPNYAASEEITSSNKDFHGSSKATSSDKRSNCNYGRGFSGLGHDSTTHSSGKGGLSRSSEQERRKGIPWTEEEHRLFLLGLEKFGKGDWRSISRNFVISRTPTQVASHAQKYFIRLNSMNRDRRRSSIHDITSVNNGDVANNQAPITGQHSSTIPSNTMGVGQSLKHRVQGHIPPGLGMYGTPVGHPVAAPPGHMASAVGTPVMLPPGPHPHAHPHPPYVLPLAYPMAPPTMHQ

SEQ ID NO: 31981 - protein, 209 aa, Glycine max
  Clone ID: TF_GmC7451_1.pep
MTRTPCCERMGSKKGPWTAEEDQILVSHIQQYGHGNWRALPKQAGLLRCGKSCRLRWINYLRPDIKRGKFSKEEEHTILKLHGIRGNRWSAIAASLPGRTDNEIKNFWHTHLKKRIQKSGVHNGNPSSRILQEAQANTSSNASSVMIANYGLPSRNINPPIAGFYGAVSSDTFGEIKDNHGSCQLSEEMEFWYNIYSSNQGKHHETMEI

SEQ ID NO: 31982 - protein, 268 aa, Glycine max
  Clone ID: TF_GmC9784_1.pep
GILHPSAKDMDRIKGPWSPEEDEALRRLVQTYGPRNWSVISKSIPGRSGKSCRLRWCNQLSPEVERRPFTAEEDEAILKAHARFGNKWATIARFLNGRTDNAIKNHWNSTLKRKCSEPLSEPRPLKRSATVSGSQSGSDLSDSGLPIILARSVSVTVAPSNHLAETASSSVTDPATLLSLSLPGFDSCDGANNGPGPNQGPSCGPFQEIPMLGSQKQLFSQEFMKVMQEMIRVEVRNYMSVLERNGVCMQTDAIRNSVLERMGIGRVE

SEQ ID NO: 31983 - protein, 194 aa, Glycine max
  unsure (1)..(194): unsure at all Xaa locations
  Clone ID: TF_GmC1460_1.pep
MGKAPCCEKHGVRRGAWTPEEDQALVDYIQKHGHGSWRSLPKHAGLLRCGKSCRLRWINYLRPGIKRGPFTSEEESTIVQLHGMLGNRWASIASQLPGRTDNEIKNFWNTHLKKRLLRSCHSQRAKQLCVIPDQSIVKSESPSTRHMVQWESVRVETEARLSLESTMLNSWPTSKTCPDHFLXLWHSEVGKSFA

SEQ ID NO: 31984 - protein, 309 aa, Glycine max
  Clone ID: TF_GmC563_1.pep
MNRGIEVLSPASYLRSSNWLFQESLGTRWTPQENKLFENALAVFDKDTPDRWLKVAALIPGKTVGDVIKQYRELEEDVSVIESGFIPLPGYTAADSFTLEWVNNQGFDGLRQFYGVTGKRGASTRPSEQERKKGVPWTKEEHRQFLMGLKKYGKGDWRNISRNFVTTRTPTQVASHAQKYFIRQLSGGKDKKRSSIHDITMVNLPEAKSPSSESNNRPYSPDHSVKDVNPPSQNQRLSTTMVIKQEHDWKLPCETVPMLFNSTNGNMFMTPLCGISSYGSKPLQEQYFLSGCQFGPYDTIMQMPSMQNQ

SEQ ID NO: 31985 - protein, 199 aa, Glycine max
  unsure (1)..(199): unsure at all Xaa locations
  Clone ID: TF_uC-gmflLIB3275P072d07b1.pep
MVRAPCCEKMGLKKGPWTPEEDQILMSYIQKHGHGNWRALPKLAGLLRCGKSCRLRWINYLRPDIKRGNFSSEEEEIIIKMHELLGNRWSAIAAKLPGRTDNEIKNVWHTHLKKRLLNSDIQKRVSKPRIKRSDSNSSTLTQLEPTSSACTTSLSDFSSFSEGTKNMDNMIKSEDIESVETIMPPIDESXWSKATVDYE

SEQ ID NO: 31986 - protein, 126 aa, Glycine max
  unsure (1)..(126): unsure at all Xaa locations
  Clone ID: TF_LIB4164-016-Q1-K1-E9.pep
MVQDMKQQDNGESKKKERHIVTWTQEEDDILREQIGIHGTENWAIIASKFKDKTTRQCRRRWYTYLNSXFKKGGWSAEEDMLLCEAQXRVFGXRWTEIAXVVSGRTXYAVXNRFXTLCRKNRNMQL

SEQ ID NO: 31987 - protein, 134 aa, Glycine max
  Clone ID: TF_GmC134308_1.pep
VQRQTLPTISSTDGIETKGIVGGNMASKRKRKAWSEEEDMQLRAAVQRWGEGNWATMAKGDDFPIKRSATQLAQRWSILRKKDGCTNTGTITSTQYTTAEQLATRHSLSLALDMPFKKLTAPGMTDEQTCYPFG

SEQ ID NO: 31988 - protein, 141 aa, Glycine max
  Clone ID: TF_LIB3242-217-Q1-J1-G4.pep
QRQTLPTISSTDGIETKGIVGGNMASKRKRKAWSEEEDMQLRAAVQRWGEGNWATMAKGDDFPIKRSATQLAQRWSILRKKDGCTNTGTITSTQYTTAEQLATRHSLSLALDMPFKKLTAPGMTDGNFLWNFIYFILIYLY

SEQ ID NO: 31989 - protein, 201 aa, Glycine max
  unsure (1)..(201): unsure at all Xaa locations
  Clone ID: TF_LIB4167-068-Q1-K1-D10.pep
MGRSRVALRSADDDPNHRSKRKKAALNVENSETLPTGQGVTTSKVSLYHCNYCNKDISGKIRIKCAVCQDFDLCLECFSVGAEVTPHKSNHPYRIMDNLSFPLICTDWNADEELLLLEGIETYGFGNWNEVAEYVGTKTKSQCIDHYNAVYMNSPCFPLPDLSHVMGKNKVELCAMAKGHEAKKEFSLTAELTLKEEAXXT

SEQ ID NO: 31990 - protein, 321 aa, Glycine max
  Clone ID: TF_GmC78832_2.pep
MEFETSYPTCFMSNSSWFSQESHYTEWTREENKKFESALAIYDKDTPDRWLRVAAMLPGKTVYDVIKQYRELEEDVCEIEAGRIPVPGYPTSSFTLKMVDNQCYDACRKKPATLRSSDQERKKGVPWTEEEHRRFLMGLLKYGKGDWRNISRNFVVTKTPTQVASHAQKYYIRQKLSGGKDNKRRPSIHDITIVNLTSDQEKPLLLNDESHMTFEQQKLTSMPKVQLEWINHHDNGSRMVVNPNYDMFMSPSSGISSKTLKLQGQDFYECAFHETYAKLKNSGFRTTSRDFNKEDSICITGCAIQVANSLADVADSHEHLN

SEQ ID NO: 31991 - protein, 177 aa, Glycine max
  unsure (1)..(177): unsure at all Xaa locations
  Clone ID: TF_GmC6850_3.pep
MQLGWEGASKKESHNNRINTHTETRQEQDRATDMKKQQQQEKHKKQMVNEESKKKERHIVTWTQEEDDILREQIGVHGTENWAIIASKFKDKTTRQCRRRWYTYLNSDFKKGGWSPEEDMLLCEAQKIFGNRWTEINRVVSGRTDNAVXNCFSTLCKKRAKYEXLSKREQHFIHQFK

SEQ ID NO: 31992 - protein, 206 aa, Glycine max
  Clone ID: TF_GmC946_1.pep
MCSAEKDGIMLFGVRLSVVDNHPTSFRKSASMTNLSQYESPPPHDPNAGYASDDVVHPSRHTRERKRGVPWTEEEHRLFLLGLQNIGKGDWRGISRNFVKTRTPTQVASHAQKYFLRRHTQNRRRRRSSLFDITTDSVMEPWPEKEEEQVVLPSARSKPVLPVPPSSKMAELDLSGKSLSLKLPVSKPPISNENFGGIPLSVLLEG

SEQ ID NO: 31993 - protein, 348 aa, Glycine max
  Clone ID: TF_GmC1327_1.pep
MGRAPCCDKANVKKGPWSPEEDAKLKSYIEQHGTGGNWIALPQKIGLKRCGKSCRLRWLNYLRPNIKHGGFSEEEDNIICSLYVSIGSRWSIIAAQLPGRTDNDIKNYWNTRLKKKLLGKQRKEQQAQARRVSNNQQKQDVKRETENLIVASEVMINQVPYWSSSEFSSVPMPVTNASSFQHYGLNNQTSLRSMMVNKLEGITFSNDHHQQQQQPYTNACEIPSLQDQVFPTMVNQVTVVSNENNSGTYQPSNIFQGFENFPSDFCELVCVNPQQMEAFNYGMESMDMTMSNGGSTNTTSTESTSWGDMSSLVYSPLVSDYERCRQGIIPQDHVVAFEECKYFGMQMQ

SEQ ID NO: 31994 - protein, 206 aa, Glycine max
  unsure (1)..(206): unsure at all Xaa locations
  Clone ID: TF_LIB5118-018-A1-PF1-G7.pep
MEEMNRSSSSTSSSSHCCSLESNHRSPNKPDRIKGPWSAQEDRILTRLVEQYGPRNWSLISRYIKGRSGKSCRLRWCNQLSPTVEHRPFSTQEDETIIAAHARXXNRXATIARLLPGRTDNAVKNHWNSTLKRRAKGINVNVNDADNEDDPLTALTLAPPGIANATLTEDAVPDHRASPESAAEGFWDMMRDAIAREVRENAPSNF

SEQ ID NO: 31995 - protein, 380 aa, Glycine max
  unsure (1)..(380): unsure at all Xaa locations
  Clone ID: TF_GmC84_4.pep
MEMQDQIESTRSTIFGSASNIHSNAEKQAENVAPKVRKPYTITKQREKWTEEEHQKFLEALKLYGRGWRQIEEHIGTKTAVQIRSHAQKFXSKVVRESEVSDEGSIQPINIPPPRPKRKPLHPYPRKSVNSFRGPTIPNEQKXSPSTNLLVAEKXTPSPTSVLSTVGSEAFGSQFSEQTNRCLSPNSCTTDIHSVSLSPVEKENDCMTSKESEEEEKASPASRPLSTVSNPKMCMKPEFSSKEIEDATDMPQTTSIKLFGRTVSMVGNQKSLKIDDDGKPITVKSDEVDDVENEKLGQSGESKQVDTQLSLGVVSGNWPITPDADGANVTSIEPPKENQCFSESAPDAFFPQWSLSQGLPPFYLRPCNQVLIPCLLGPPL

SEQ ID NO: 31996 - protein, 307 aa, Glycine max
  Clone ID: TF_GmC283_1.pep
DMELETIYPPCFMPNSNWFVQESHSTEWTREDNKKFESALAIYDNDTPDRWFKVAAMIPGKTVFDVIKQYRELEEDVSEIEAGRVPIPGYLASSFTFELVDNHNYDGCRRRLAPVRGSDQERKKGVPWTEDEHRRFLMGLLKYGKGDWRNISRNFVVTKTPTQVASHAQKYYIRQKVSGGKDKRRPSIHDITTVNLTETSASDKNKPQLFNASPVLAPQQKLNSISKVQLGWTSSHYNDGSFMVFNPNSDALFVSSSPDVTSMALKMQGQDLYDCALHEAYAKVKVPGFSMAPRDFNNEAVFGIHAL

SEQ ID NO: 31997 - protein, 236 aa, Glycine max
  Clone ID: TF_GmC948_1.pep
MFQESSATRWPTQPTQWTRYHDKLFERALLVVPEDLPDRWEKIADQVPGKSAVEVREHYEALVHDVFEIDSGRVEVPSYVDDSVATPPSGGAEISTWDNANQISFGSKPKQQGDNERKKGTPWTEEEHRLFLIGLSKFGKGDWRSISRNVVVTRTPTQVASHAQKYFLRQNSVKKERKRSSIHDITTVDSNSVPVPIDQNWVPPPGGSVQQSLQYPSSNMLDQMGTFGYSNYGFGM

SEQ ID NO: 31998 - protein, 233 aa, Glycine max
  Clone ID: TF_GmC948_2.pep
MFQESSVTRWPTQWTRYHDKLFERALLVVPEDLPDRWEKIADQVPGKSAVEVREHYEALVHDVFEIDSGRVEVPSYVDDSVAMPPSGGAGISTWDNANQISFGSKLKQQGENERKKGTPWTEEEHRLFLIGLSKFGKGDWRSISRNVVVTRTPTQVASHAQKYFLRQNSVKKERKRSSIHDITTVDSNSAPMPIDQTWVPPPGGSLQQSQQYPSSNMHDQMGTFGYSNYGFDM

SEQ ID NO: 31999 - protein, 132 aa, Glycine max
  Clone ID: TF_GmC74328_1.pep
MGRAPCCDKANVKRGPWSPEEDTKLKSYIEEHGTGGNWIALPQKIGLKRCGKSCRLRWLNYLRPNIKHGGFSEEEDNIICSLYVTIGSRWSIIAAQLPGRTDNDIKNYWNTKLKKKLLRKQKKEQQAQARKV

SEQ ID NO: 32000 - protein, 440 aa, Glycine max
  Clone ID: TF_GmC3745_1.pep
LEESTPIAGTTKARARRWTEEEDKLLSEKVKKHNGRNWKKIAAYLPGRTDVQCLHRWQKVLNPDLVKGSWTKKEDDRLIELVRKYGIKRWFFIAKYLPGRIGKQFGSRWHNHLDPTVKKDAWTEEEELILAYYYQIYGSKWAEIARILPGRTDNAIKNHWNCSMKKKLDASPLGCDIKVAPSGFCASGIRPEHVVAKVEGQSFNGMVSPKQSHWLNRSVDNILTKLILQNDSGEESCSASSRGTPTPRASRQFLDNSLDCLPLSSTVTDEAYESLKRQKVYFSDTELKVGDESDSPLLNLSYSKSANREKKGQAGNGGNYNSNNTMPHSVDEFSECLSPKTHMALACAYNNGCTPPTSILKNDTGDINPETLLRNLAMTYENVPSIIRKRTPKKASCCDRDQAPSRMIVNSPEAECVIGLDNLKLNRGFIPFLRRPNTQP

SEQ ID NO: 32001 - protein, 190 aa, Glycine max
  Clone ID: TF_GmC142751_1.pep
MGRAPCCDKNGLKKGPWTTEEDQKLIDYIQKHGYGNWRTLPKNAGLQRCGKSCRLRWTNYLRPDIKRGRFSFEEEETIIQLHSILGNKWSAIASRLPGRTDNEIKNYWNTHIRKRLLSMGIDPVTHSPRLAHVDISSTRSAALHGPSQRIFLWLLAMHQPMAPPQPPVRAAPRASTSRLLPLLPLAAPPP

SEQ ID NO: 32002 - protein, 97 aa, Glycine max
  Clone ID: TF_uC-gmflminsoy066h08b1.pep
GVLSYDPGVGRGPWTMEEDLIWITYIANHGEGVRDSLVKAGGLKHSGKRCRLRWLNYLRADVRRGNITLDEQLLIMGLHAEWGNRWFKIAKLVPGRT

SEQ ID NO: 32003 - protein, 274 aa, Glycine max
  Clone ID: TF_GmC1225_1.pep
MGRQPCCDKLGVKKGPWTAEEDKKLINFILTNGQCCWRAVPKLAGLKRCGKSCRLRWTNYLRPDLKRGLLTEAEEQLVIDLHADCCLRWSKIAARLPGRTDNEIKNHWNTHIKKKLLKIGIDPVTHEPLKKQAAASSQDSSSSPAEHLPQPGNNLDDQVKETEGILLNSEENSSSSQAENSSGDDSLLLDSICSDDSLLNSMWLDETPLVEALWDTTPNLENTSNNMGLLPSWEDNCAWLLDCQDFGIHDFGFTCFNEIESHALQTIGMKEEGH

SEQ ID NO: 32004 - protein, 373 aa, Glycine max
  Clone ID: TF_GmC148_1.pep
MGRAPCCSKVGLHKGPWTPKEDALLTKYIQAHGEGQWKSLPKKAGLLRCGKSCRLRWMNYLRPDIKRGNIAPEEDDLIIRMHSLLGNRWSLIAGRLPGRTDNEIKNYWNTHLSKKLKIQGTEDTDTHKQVQITMGRSPCCNKNGLKKGPWTPEEDDLIIRMHSLLGNRWSLIAGRLPGRTDNEIKNYWNTHLSKKLKIQGTEDTDTHKMLENPQEEAASDGGNNNKKKKKKKNGGKKNKQKNKGKENDEPPKTQVYLPKPIRVKAMYLQRTDSNTFTFDSNSASGSTSQEKEESPVTKESNVVSEVGNVGEESDGFGFFSEDHDLVNVSDIECHSYFPTDHGNLQQLYEEYFQLLNMDHGQFELNSFAESLLD

SEQ ID NO: 32005 - protein, 282 aa, Glycine max
  Clone ID: TF_GmC600_4.pep
YSLQLAEKMVQQEIRRGPWTEQEDYKLVYFVGMFGDRRWDFIAKVSGLNRTGKSCRLRWVNYLHPDLKRGKLTPQEQHLLTPQEEHLVMDLHSKWGNRWSRIARRLPGRTDNEIKNYWRTHMRKKKAQEKKHASAASPVSSSCQSSLSSNNHVVDSHASKEVGEESCYDTGGYDDGMMMGLIGGEKGYSMDDIWKDIMSEEENNIYNNNLQPVYEGHSEEGCNFSCPPPPMIMPSPPSWDQYNISSQPLWVMDEEESNKMLFPTLSDQYFPYYEQGNAFLTG

SEQ ID NO: 32006 - protein, 90 aa, Glycine max
  unsure (1)..(90): unsure at all Xaa locations
  Clone ID: TF_GmC1327_2.pep
MGRAPCCDKANVXKKGPWSPEEDAKLKSYIEQHGTGGNWIALPQKIGLKRCGKSCRLRWLNYLRPNIKHGGFSEEEDNIICSLYVSIGSR

SEQ ID NO: 32007 - protein, 236 aa, Glycine max
  Clone ID: TF_GmC341_2.pep
MDVKKGGSVVQAQVKLQKHNEKEMGMRKGPWAVEEDTILVNYIATHGEGHWNSVARCAGLRRSGKSCRLRWLNYLRPDVRRGNITLQEQILILDLHSRWGNRWSKIAQQLPGRTDNEIKNYWRTRVIKQAKQLKCDVNSKQFRDTLRYVWMPRLLERLQPTSQALEPNQSGLVLHASSSLLPSNSDHSIERGSDLWPGFNNQMLLEQGSGGDLLESLWDDDNMCFLQQLSYDLQMK

SEQ ID NO: 32008 - protein, 353 aa, Glycine max
  Clone ID: TF_GmC6838_1.pep
MGHHSCCNKQKVKRGLWSPEEDEKLINYITTYGHGCWSSVPKLAGLQRCGKSCRLRWINYLRPDLKRGSFTPQEAALIIELHSILGNRWAQIAKHLPGRTDNEVKNFWNSSIKKKLLSHDVVPSLATFSDHIHGPPNGSMESFFPLTDNPILNSHHHLDQLFLPIIPSPILQAFDHHHHNNDIKIDINKFFNNNANFLQYFQNPMPETVPPISNTTIPSLYEEDAWSSLGCVPIHLNPNQENQIMITKSDHTTPHLIVEKFINPSTWQQQQHSVEVEPPILPKVCESIEDYVCSIPYSSSVNSQDQHVEAVACFTPVICPQDQVEYIDALIMSSLPSSTTTSSSVVSFFQADK

SEQ ID NO: 32009 - protein, 67 aa, Glycine max
  Clone ID: TF_GmC175358_1.pep
IHCNWFYFVVVVINLPGLARCGKSCRLRWLNYLRPNLKRGNYTKEEEETIIKLHKLEKSYEIVNPIF

SEQ ID NO: 32010 - protein, 196 aa, Glycine max
  Clone ID: TF_GmC78832_3.pep
MMHAEKSPATLRSSDQERKKGVPWTEEEHRRFLMGLLKYGKGDWRNISRNFVVTKTPTQVASHAQKYYIRQKLSGGKDNKRRPSIHDITIVNLTSDQEKPLLFNDESHMTSEQQKLTSMPKVQLEWRINHHNNGGSNYDMFVSPNSSGISSKTLKLQGQDFYECAFHETYAKLKNTGFRTASRDFNKEAIFGIHAL

SEQ ID NO: 32011 - protein, 172 aa, Glycine max
  unsure (1)..(172): unsure at all Xaa locations
  Clone ID: TF_GmC73535_1.pep
MRRMKKDIEDEVLPNDMSGAQLNDESYEGSAGIVLKKGPWTSTEDDILVDYVKKHGEGNWNAVQKHTGLFRCGKSCRLRWANHLRPNLKKXGAFAAEEERLIAELHAKMGNKWARMAAHLPGRTDNEIKNYWNTRIKRRQRAGLPLYPPEVSLHALQESQHSQSTGGLKWWR

SEQ ID NO: 32012 - protein, 281 aa, Glycine max
  Clone ID: TF_GmC794_1.pep
MGRHSCCYKQKLRKGLWSPEEDEKLLRHITKYGHGCWSSVPKQAGLQRCGKSCRLRWINYLRPDLKRGTFSQEEENLIIELHAVLGNRWSQIAAQLPGRTDNEIKNLWNSCLKKKLRQKGIDPVTHKPLSEVENGEKAAEVSNELNLLKSESSKSDSASYEQRTSISPKAYAPEMDGSCSSKIEINFVTNNNCYNKDLFLDRFMSSSRQESYTTSCQPSDLMGNFPIQMSYATNDHCLPNDSNSSHWFSQTGRSFDMNTDVSFQCRCHFYQSYTYNQLVSS

SEQ ID NO: 32013 - protein, 154 aa, Glycine max
  unsure (1)..(154): unsure at all Xaa locations
  Clone ID: TF_jC-gmXLIB3563P066cf08a1.pep
GRSPCSDDNGLXKGPWTPEEDHKLVQPIQKHGPGSRRALPKIAGLNKCGIRCGLRGTNYLRPDIKKGKFFQEEEQTMLHLHSILGNKRAAIASHLPCRTDHEIXNFWNTPFMKKLIXQMGFDSMTHQPTTDLVCTLTHLVALGNITDLMGHFTL

SEQ ID NO: 32014 - protein, 429 aa, Glycine max
  Clone ID: TF_GmC567_1.pep
MGRHSCCYKQKLRKGLWSPEEDEKLLNHITKHGHGCWSSVPKLAGLQRCGKSCRLRWINYLRPDLKRGAFSQQEENMIVELHAVLGNRWSQIAAQLPGRTDNEIKNLWNSCLKKKLRQRGIDPTTHKPLSEVENDKDMNMMPPSTDKSTQKASVGSNEVVSNLVDHHQPPKTMPNSSSERYPLEVSTTSSTQELFLDRFGTTPTTCHENNNNTSDLVGSYFSFQHLNYGTTTSMALSSNPNTSLCFILPSTSSDINNNNSIITSSSMLPSIFPTQHVKLQSNNNNPSSISSDGVQNWETSNNTNKNNGNMQLQSSTNYLDSTWGVAESMKIVNINKEAHVVPLQAEQEDLKWSEYLYTNTPFILGNNTAQNHQIHTSQSIYSEVKPETGFITDESCATWHHYQNQTPALLSDIYSKDLQRFSVTFGQTL

SEQ ID NO: 32015 - protein, 234 aa, Glycine max
  Clone ID: TF_GmC1102_1.pep
MVRAPYFDKNGIKKGAWSEEEDKRLMAYVERHGHPNWRQLPKFAGLQRCGKSCRLRWMNYLRPNLKRGNYTQKEEQIIKDLHKKHGNKWSLIAENLPGRTDNEIKNYWHSNLKKFLKGNENTPCDDDDELKSTECKEFERSMNKAHSADSHHILESSVSISSETSYTEGNSPSFSSSHTTESSTLSKEEDSVVSWQTMDVLSSNFWTEPFISENALNQDYFPISSYGTEPFFLW

SEQ ID NO: 32016 - protein, 301 aa, Glycine max
  Clone ID: TF_GmC5525_1.pep
MGRSPCCEKEHTNKGAWTKEEDERLINYIKLHGEGCWRSLPKAAGLLRCGKSCRLRWINYLRPDLKRGNFTEEEDELIINLHSLLGNKWSLIAARLPGRTDNEIKNYWNTHIKRKLYSRGIDPQTHRPLNAASATPATTVTATAVPSSNSKKKIKNNNNNNNGFQLVNNSAYANTKIGTDMIAAEDSNSSSGVTTEESFPHHQLNLDLSIGLPSQPQVSSSLNPEKLKPEPQEHDDQKPQVLYQLYGKNITGQQGVCLCYNLGLQSNQACYCKTMGTSTTTVTTTTATDRNLYRFYRPMNI

SEQ ID NO: 32017 - protein, 75 aa, Glycine max
  Clone ID: TF_GmC16783_2.pep
MADSDRSSSEVSTHSTDSGKRGSSKVEFSEDEETLIIRMYKLVGERWSLIAGRIPGRTAEEIEKYWTSRFSGSSE

SEQ ID NO: 32018 - protein, 114 aa, Glycine max
  Clone ID: TF_GmC100_2.pep
MRKPEVSGKNNNINNKLRKGLWSPEEDDKLMNYMLNSGQGCWSDVARNAGLQRCGKSCRLRWINYLRPDLKRGAFSPQEEEIIIHLHSLLGNRYNILYTLLFYLHMHVFITIFV

SEQ ID NO: 32019 - protein, 288 aa, Glycine max
  Clone ID: TF_GmC1274_2.pep
MPLSSSSSSAVDSAVSGEIMLFGVRVVVDSMRKSVSMNNLSQYELPRDAANAKDDAAGYASADDAAPINSDKNRDRKRGIPWTEEEHKLFLVGLQKVGKGDWRGISRNYVKTRTPTQVASHAQKYFLRRTNLNRRRRRSSLFDITTDSVSTTPMEEGVQIQHQDNVSLFHPVYPVTPEGSNMNGFPKMSMYPKDVGSGVMSVQAGNPMETLTLGQGNVEKHNVPSTANKASTVSGIITPGSSSSAIDPPPTLSLGLSFSSDQRQTSSRHSALHAMQCFSNGDSIISVA

SEQ ID NO: 32020 - protein, 174 aa, Glycine max
  Clone ID: TF_jC-gmst024169f06b1.pep
TRPERTTRSGHSRTLGSPPLRLSMVSASAPPPQAQSDAAGSGEEVSKKVRKPYTITKSRESWTEQEHDKFLEALQLFDRDWKKIEAFVGSKTVIQIRSHAQKYLLKVQKNGTSEHVPPPRPKRKAAHPYPQKASKNGHIFVISEEKMSQDKKAVAETKLTEEEKLLEEKIAGFG

SEQ ID NO: 32021 - protein, 585 aa, Glycine max
  Clone ID: TF_GmC1050_1.pep
TDEDLHLYGTNTYHDESHPVEARNLSAELNESKEINWTEVDLEDANVTSGACQINIDSKQGCDGSEVFLCGSNKSGSVGERADIIMSDSTEVENDKANKLGGAATELISAPNTREPCQSNSIAEDRMVVSEVSSGGLGNELERHRVSSTLCVDDRDNKHEADSGVIVDMKSSVHDLSTMINSSISSLGNSCSGLSFSSENKHVPLGNPRVSALSMDNLHALLQNTVAVDVQCEKTASQDQMSSTCDIRGGRDMHCQNSISNADHQHITGNLSDHVDAVSILQGYPLQVPVKKEMDSDMNCTSSATELPFLPHKIEQDDDHIKTFQSSDSDKTSRNGDVKLFGKILTNPSTTQKPNVGAKGSEENGTHHPKLSSKSSNPKITGHHSADGNLKILKFDHNDYVGLENVPMRSYGYWDGNRIQTGLSTLPDSAILLAKYPAAFSNYLTSSAKLEQPSLQTYSKNNERLLNGASTFTTRDINGSNALIDYQMFRRDGPKVQPFMVDVKHCQDVFSEMQRRNGFEAISSLQQQSRGMNGVGRPGILVGGSCSGVSDPVAAIKMHYSNSDKYGGQTGSIAREDESWGGKGD

SEQ ID NO: 32022 - protein, 318 aa, Glycine max
  Clone ID: TF_GmC934_1.pep
TRRTPSCDKSGMRKGTWTLEEDRKLIAYVTRYGSWNWRQLPRFAGLARCGKSCRLRWIEYLRPDVKRGNFTQQEEEFIIRMHKKLGNRWSTIAAELPGRTDNEIKNHWHTTLKKRSQQNTLTKEEARASKSKDKVLPNKGVTVTLPATSSQISDNSSLSPASSTSSEFSNITSDPSTAASMQNLVFEDDDEFGFLDSYIDPMNNESFWKELTLDDISFNNVPIVSEDTNGCFQSTSSSNSNTLDSLHKSTSESIVADNDFGGFFDAYAEATVDNFWTQPYVAGMSSHVPTELLAPSVAESEYFTPIYDDLWGQTHLYY

SEQ ID NO: 32023 - protein, 395 aa, Glycine max
  Clone ID: TF_GmC156_2.pep
FSCLCWTFLDFGIRIQKQRERWTDEEHKKFLEALKLYGRAWRRIEEHVGTKTAVQIRSHAQKFFSKILRESSGNSTTLEESIEIPPPRPKRKPIHPYPRKLVEFPKTGISNSEHPLRSNSLKSSDFGQENNSPKSVLSTVVSETVGSSDSDTSSRCLSPASSISGVPTNRFPLAEPKTSFKEEGSAPSSAHDEQPPVKLEFFHKESVSTRDDATEESSGRTLKLFGTTLLVTDTCKPSSPTTEPCKPTPAAAMYLMQLQNVCSDVTEGHASIVPWWTLPHNTPFMPLHKEPKGKHLYSNLGEFEHKEVQKEGSWTGSNTSSIDDGDNTEKSDDQAKSHVHGFSKSETLTISELRVRPKTCGKGFVPYKRCMAERENQCSSVYYEEREEQRIKLSL

SEQ ID NO: 32024 - protein, 216 aa, Glycine max
  Clone ID: TF_LIB5118-056-A1-PF1-A5.pep
MPPSKRSKHRRMGSNTSTEEKSDFEARMKIPAELVKGPWKKQEDELLASLVEEHGPKDWSKIANKMAQLGHVRMGKQCRERWFNHLSPEVRKESWTAEEDRVIIESHRQLGNKWTAISRLLNGRPANAIKNHWNSTLKRQVQFGAEIGSGSPRPGKRQRATVGHQPRKKRRLDVSSYESDEDFDSTSDEMDDDDSELVTYESRNEDQEDQRTFATS

SEQ ID NO: 32025 - protein, 350 aa, Glycine max
  Clone ID: TF_GmC1121_1.pep
MEPEETAAAADGSFDEGLLGLDDGGGGGRDRVKGPWSPEEDAILSRLVGKFGARNWSLIARGISGRSGKSCRLRWCNQLDPAVKRKPFTDEEDRMIVAAHAIHGNKWAAIARLLPGRTDNAIKNHWNSTLRRRGVGHDTIKLESVSFMEDVSLEKAKASSEDTLSCGDVSLKSSEGRDVSSMEIMDDKSDDKAQTEGQIHHEVKDLPTLFRPVARVSAFNVYHSFDGTQPSTSIKRPVPMQGAVLQSSKPDMEFCRMLEGICGDQSVPHQCGHGCCAAPDGRKSESSLLGPEFVEFSEPPSFPNFELAAIATDISNLAWLKSGLESSSAKMMGNTSGRVVSNGSQVHIGH

SEQ ID NO: 32026 - protein, 163 aa, Glycine max
  Clone ID: TF_jC-gmXLIB3563P057bh11a1.pep
MSSCITSSVDPVEGNRDRKFLKVNPLCKPPMTPDVTQDVDDETCSDESCGEMDPTDWTDDEKTAFLQAVSSFGKDFAKIARCVGTRSQEQCKVFFSKGRKCLGLDLMRPIPENVGSPVNDDANGGESDTDDACVVETGSVVGTDKSGTKTDEDLPLYGTNTYH

SEQ ID NO: 32027 - protein, 226 aa, Glycine max
  Clone ID: TF_GmC139_1.pep
MGGVAWTEEEDHLLKKCIQQYGEGKWHRVPLLAGLNRCRKSCRLRWLNYLRPNIKRGNFAEEEVEMIIKLHKLLGNRWSLIAGRLPGRTANDVKNYWNCHLSKKLNVIEAEDRPITRDVQVIRPQPRNIVGSSSVKRRGQNESPTDKGVQQESSMSSLTFDTADGQNHMLDSQQDNNIYACLDQQGIVSELSMDFQFEGFGAMMNGEGSSSQWDWGDLLLDMDLYK

SEQ ID NO: 32028 - protein, 84 aa, Glycine max
  Clone ID: TF_GmC130538_1.pep
MGRHSCCLKQKLRKGLWSPEEDEKLFNYITRFGVGCWSSVPKQAGLQRCGKSCRLRWINYLRPDLKRGIISPLFSLLIISLHEV

SEQ ID NO: 32029 - protein, 138 aa, Glycine max
  unsure (1)..(138): unsure at all Xaa locations
  Clone ID: TF_LIB4199-010-Q1-K1-A5.pep
MVQDMKQQDNGESKKKERHIVTWTQQEDDILREEIGIHGTENWAIIASKFKDKTTRQCRRRWYTYLNSDFKKGGWSAEEDILLCEAQKIFGNRWTEIAKVVSGRTDNAVKNRFFTLCRKKTKYEALAXENSTSYIKFN

SEQ ID NO: 32030 - protein, 575 aa, Glycine max
  Clone ID: TF_GmC1645_1.pep
GSPNARVSSANKNSTSISVPLRNSCALREFIPSVKEVITRDETNESFVTDELENQKLEIDDGKHTQKTNDTCEVSKLENSGASELVQTEKTDGRNCALTIDGVPGNQNYPRHVPVHVVDGNLGTSTQNLSPDMVFQDSIFQPKGGVNRQPNLVTNSATSHISECQNNAARSSIHQSFPPSPPFAQDDYHSFLHMSSTFSSLIVSTLLQNPAAHAAASFAATFWPYANAETSADSPVCTPDFPSRQIGSPPSVTAIAAATVAAATAWWAAHGLLPLCGPLHTAFACPPASATTVPSMIIDESPQKTERGEIKPQNPPLQDQIPDPEHSEAQHSAPKSPAVSSSKSEDRGDANLDTSPKATNHEMNQAISENPDSNKMKGRKPVDRSSCGSNTTSSSEETELLEKDEKEKEEPKTPDANVLDTELSNRRSRSINNLTDSWKEVSEEGRLAFQALFSREVLPQSFSPTHHLINKDNQIDSIKDNELNTDYKDEDLESKKCSSICDGVQKNLLFVKDNNEEEGLLTIGLGPGKLKTRRTGFKPYKRCSVEANENRIGTACIQGEEKGPKRLRLNGEAST

SEQ ID NO: 32031 - protein, 259 aa, Glycine max
  unsure (1)..(259): unsure at all Xaa locations
  Clone ID: TF_GmC184_1.pep
MYYEDMAGNVGWGVIEEEGWRKGPWTSEEDRLLILYVKXHGEGRWNSAARLAGLKRNGKSCKLRWVNYLRPHLKKGQITNSARGIIQELHARWGNRWSTIARSLPGRTDNEIKNYWRTHFKKKMKTPSDAAEKARIHSSRRQHFQQQQQQLKQQQQQFQFNLDMKGIINLLEENDHRVPSISQEAQEMASMYPNTSEHQGYFYSIFNVNDNDNNVSAPESSNEEILWDGLWNLDDVLCNFNAASATSKASLHNLVSPFC

SEQ ID NO: 32032 - protein, 267 aa, Glycine max
  unsure (1)..(267): unsure at all Xaa locations
  Clone ID: TF_GmC1130_2.pep
MNSSTNTSNSQSMAAAASDGSGKKVRKPYTITKSRESWTEEEHDKFLEALQLFDRDWKKIEDFVGSKTVIQIRSHAQKYFLKVQKNGTVAHVPPPRPKRKAAHPYPQKASKNVLVPLPASVGYASSRNTLAPGFASWDETSLLMNAGADKPMTXYDCQDELNVQFGSRADIGSKGITQITNSSLSGVGNSTRTLLTSEIPKQGKQAPVLHGLPDFAEVYGFIGSVFDPETNDHVQKLKEMDPINFETVLLLMRNLTVNLSSPDFEPI

SEQ ID NO: 32033 - protein, 97 aa, Glycine max
  Clone ID: TF_GmC1130_3.pep
MNSTTNTSNSQSMAAAAPSDGSGKKVRKPYTITKSRESWTEEEHDKFLEALQLFDRDWKKIEDFVGSKTVIQIRSHAQKYFLKVQKNGTVAHVPPPR

SEQ ID NO: 32034 - protein, 157 aa, Glycine max
  Clone ID: TF_GmC6850_6.pep
GLQEDDILREQIGVHGTENWAIIASKFKDKTTRQCRRRWYTYLNSDFKKGGWSPEEDMLLCEAQKIFGNRWTEIAKVVSGRTDNAVKNRFCTLCKKRAKYEALVKENSTSYINSNNKRIFLQHGCDTNVASETAIKKMRRSHIPDAAEKINFGRQIT

SEQ ID NO: 32035 - protein, 336 aa, Glycine max
  Clone ID: TF_GmC192_4.pep
MGRQPCCDKVGLKKGPWTAEEDKKLISFILTNGQCCWRAVPKLAGLLRCGKSCRLRWTNYLRPDLKRGLLSEYEEKMVIDLHAQLGNRWSKIASHLPGRTDNEIKNHWNTHIKKKLKKMGIDPATHKPLPNANEQNQNQTRQDQQLHHQPVELEEPNQQPLQVDFDPKVDPNKEPEKPETSLESSTITEEAKEEDQIITPLFDTMELMNGFCTDEVPIIEPHEILMPCAPSSSSTTSSSSSSNSTNFLEDLQLPDFEWSCNYNDNNTITNNNNNEDKDDDNNNNSSMALWDDDIIGNRYWLINEDDDSDENQVFDASLTQFSKMFMESESWGYGLF

SEQ ID NO: 32036 - protein, 133 aa, Glycine max
  Clone ID: TF_GmC482_2.pep
LLSEKLEDTYSLTSLAITSIIAAHARYGNRWATIARLLPGRTDNAVKNHWNSTLKRRAKGINVNVNDADNEDDPLTALTLAPPGIANATLTEDAVPDHRASPESAAEGFWDMMRDVIAREVREYVSSNFSDNN

SEQ ID NO: 32037 - protein, 299 aa, Glycine max
  unsure (1)..(299): unsure at all Xaa locations
  Clone ID: TF_GmC563_2.pep
MNRGIEVLSPASYLQNSNWLFQESKEARWTAEENKLFENALAYYDKDTPDRWMRVAAMIPGKTVGDVIKQYRELEEDVSVIEAGLIPVPGYTTASSFTLEWVNNQGYDEFKQFCNVGAKRGASTRPTEQERKKGVPWTEEEHRQFLLGLKKYGKGDWRNISRNFVTTRTPTQVASHAQKYFIRQLTGGKDKRRSSIHDITMVNLQETKSPSSDTTKPSSPLQNQALSSMVKEEYEWKLPCEGMPIVFNSTSGNMFMSAPLHGISSYESRPQEQNLLRXLHGCQFSPCDAILQMQLMRHR

SEQ ID NO: 32038 - protein, 173 aa, Glycine max
  Clone ID: TF_GmC1779_1.pep
MTGGHDRVKGSWSPQEDATLLKLVNEHGARNWSVISAGISGRSGKSCRLRWCNQLSPEVQHRPFTPAEDKMIIKAHAIHGNKWATISRLLPGRTDNAIKNHWNSTLRRRRAVESSSSSSASPPAKRHSSLFDTLHPFKKQCIEKENEEERVLSPVTTSLSLLEREPRLSTACH

SEQ ID NO: 32039 - protein, 337 aa, Glycine max
  Clone ID: TF_GmC78832_1.pep
MEFETSYPTCFMSNSSWFSQESQFTEWTREENKKFESALAIYDKDTPDRWLRVAAMLPGKTVYDVIKQYRELEEDVCEIEAGRIPVPGYPTSSLTLKMVDNQCYDACRKKPATLRSSDQERKKGVPWTEEEHRRFLMGLLKYGKGDWRNISRNFVVTKTPTQVASHAQKYYIRQKLSGGKDNKRRPSIHDITIVNLTSDQEKPLLLNDESHMTFEQQKLTSMPKVQLEWINHHDNGSRMVVNPNYDMFMSPSSGISSKTLKLQGQDFYECAFHETYAKLKNSGFRTTSRDFNKEVRQLFNMSISLYRLNLHHRMRHSGILSLGQRDNIQYSCTLILL

SEQ ID NO: 32040 - protein, 213 aa, Glycine max
  Clone ID: TF_GmC1768_2.pep
MGRAPCCEKMGLKRGPWTPEEDQILINYINTYGHANWRALPKLAGLLRCGKSCRLRWINYLRPDIKRGNFTREEEDTIISLHEMLGNRWSAIAARLSGRTDNEIKNVWHTHLKKRLPQNYQQSHHTKKRSKKQPPKLDADASKSNQDAKLEQQDPVNIHGSNSEDMMMPLSPPHCSSDMSSSLTTSDNNSNVNIINNNHDMSLNVNDYDIDTE

SEQ ID NO: 32041 - protein, 196 aa, Glycine max
  Clone ID: TF_GmC1321_2.pep
MDEKGARSSNTLLSCEDEMDLRRGPWTVDEDLTLINYIATHGEGRWNTLALSAGLKRTGKSCRLRWLNYLRPDVRRGNITLEEQLLILELHSRWGNRWSKIAQYLPGRTDNEIKNYWRTRVQKHAKQLKCDVNSKQFKDAMRYLWMPRLVERIQAAATAHHHRNCCGFSNGICRCYHNHHHQQQHHHIQLLRQQQP

SEQ ID NO: 32042 - protein, 393 aa, Glycine max
  Clone ID: TF_GmC988651_1.pep
MFGFSQQHNNVDNNGGTSSLSDDEDDLTRFFDYDTAPGQNLDELFAPSIVTQLPPMLPAEATQHHHTLPQHVNQIVSSSPVDLPSHVPIEALVQQNGGSSVQRQRGKGLQWTVEEHMKFLVALDEVGKGDWITISKHIGTKSSTQVASHAQKYYLRQKAKKKIRKSIHDITLNTISHQDDTQNSTPHPDPEIQPVHEIHQMQEMPPNSMTHQMSGFEYFANQQVHEIQQMQDILSVYPSNNITHQMGGFEHFVNQQVHEMPVYPPNNMTHQMSGFEHFANQQVHEMQQMQDILSMYPSNNMIHQMNGSEYFVNQQVHEMPVHPPNNMTHQMSGFQYLANQQVHKIQQMQDILPAYPSNNMTHQMSGFECSNKDFGRGCYKPEYPPNNTSSSNN

SEQ ID NO: 32043 - protein, 355 aa, Glycine max
  Clone ID: TF_GmC1310_1.pep
MGRAPCCDKSNVKKGPWSPDEDAKLKSYIEQHGTGGNWIALPQKIGLKRCGKSCRLRWLNYLRPNIRHGGFSEEEDNIICSLYVSIGSRWSVIAAQLPGRTDNDIKNYWNTRLKKKLLGKHRKELQARNKGNGGILKQENSSSLLLQQNSAQQLHPCWPQIPVLPLSSPYTNQSPSFNDQDSIRKLLIKLGGRFSDDYQPILDGLNLQFPHGSNSLSSTQQIQEEQVHVGSSALGCMNSIGHNQVQFGQSNEYCAELVQGQGSFITTAIGEMVSSNDYSRRLLGGSLEFFYGEEMITDNKIMGACASSSCGQSTNWGETSSSLMYPSLVASNYEGVRQEMPRECAFQELSYPGAQ

SEQ ID NO: 32044 - protein, 341 aa, Glycine max
  Clone ID: TF_GmC691_1.pep
MRKPYMMEKDKMNNNIKSKLRKGLWSPEEDEKLLRYMITKGQGCWSDIARNAGLQRCGKSCRLRWINYLRPDLKRGAFSPQEEELIIHLHSILGNRWSQIAARLPGRTDNEIKNFWNSTLKKRLKMNNNINATSSPNNSYSSSEPRDVNVMGGIMPMNEHDLMTMCMDSSSSTSSSCMQSMHTTNRAVTDQFDPFPLLSNNRYDMTGATDFLDNMAACLTQVGMVDHDHGVVHDGYGTLEPNKTGLESDFSLPPLESRSIDDNSSTPIDHVKSHNNNNHFKNSCFNNTDHHHHIQCSNNVVVEDLFGFGNHGHGESFRMEEWDFEGLIQDIPYFSSLDFQV

SEQ ID NO: 32045 - protein, 307 aa, Glycine max
  Clone ID: TF_GmC3823_1.pep
MGRSPCCSKEGLNRGAWTAHEDKILREYIRVHGEGRWRNLPKRAGLKRCGKSCRLRWLNYLRPDIKRGNISPDEEELIIRLHKLLGNRWSLIAGRLPGRTDNEIKNYWNTNLGKKVKDGHQTTTGNNTQNPMPNPSPSLSPPKLDSHVVRTKATKCSKLLFLNPPPHPSMQNKFKTEAEEEEEEARLVNGVIRNQMEHTTYDNGFLSFPDEEKELSTDLLIDFNVGDFCLSDFLNSDFSNSYNFSCNINNVNNHEQLSPCSDQPDPMFSDEVLKDWTHSNFADEANASNNLRSFISFLESTEERLGE

SEQ ID NO: 32046 - protein, 305 aa, Glycine max
  unsure (1)..(305): unsure at all Xaa locations
  Clone ID: TF_GmC508_1.pep
MMAVARKEMDRIKGPWSPEEDEALQKLVERHGPRNWSLISRSIPGRSGKSCRLRWCNQLSPQVEHRAFTPEEDETIIRAHARFGNKWATIARLLSGRTDNAIKNHWNSTLKRKCASFMTADEAAAGGFSPRPLKRSFSAGTAVPPPGSPSGSDVSESSAAPGVXLSLSLPSQVFRPVPVRPVVETASSQDDADADAEDAGPTTSLSLSLPGVESSEISNRTSTVPVMPVHTVAAAAPVPLPAPEVGLGALNLNAEFMAVMHEMIRKEVRSYMEQQNGMMCFQGMEMMEGFRNVSVKRIGISRVDS

SEQ ID NO: 32047 - protein, 295 aa, Glycine max
  Clone ID: TF_GmC508_2.pep
MIAVARKDMDRIKGPWSPEEDEALQKLVERHGPRNWSLISRSIPGRSGKSCRLRWCNQLSPQVEHRAFTPEEDETIIRAHARFGNKWATIARLLSGRTDNAIKNHWNSTLKRKCASFMMAGDEAVAVSPRPLKRSFSAGAAVPPPGSPSGSDFSESSAPGVVSVSPSHVFRPVPVRPIVETASSQDDADDAGPATSLSLSLPGVESAEISNRATTVPVMPVNTVAAPAPVPAEVGLGALNLSGEFMAVMHEMIRKEVRSYMEQQKNGMMCFQGMEMMEGFRNVSVKRIGISRVDS

SEQ ID NO: 32048 - protein, 124 aa, Glycine max
  Clone ID: TF_10237307.pep
MGRPPCCDKIGIKKGPWTPEEDIILVSYIQEHGPGNWRSVPSNTGLMRCSKSCRLRWTNYLRPGIKRGNFTDHEEKMIIHLQALLGNRWAAITSYLPQRTDNDIKNYWNTHLKKKLKKMQNWRW

SEQ ID NO: 32049 - protein, 208 aa, Glycine max
  unsure (1)..(208): unsure at all Xaa locations
  Clone ID: TF_GmC90208_1.pep
MAPTRKSRSVNKRMSSSNDNSPERDGINSNKNKLRKKKLTDKLGSQWSKEELERFYEAYRKYGKDWKKVAAFIRNRSTEMVEALYNMNRAYLSLPEGTASVVGLIAMMTDHYNVMEGSDSERESNDAPGSQKPVKRKHEEVQLSVSKDQSHSIASRDDCLSILKKRRXDGMQLKPYAVGKRTPRXPVYKKDDTEXYVSPYRRKPEVDY

SEQ ID NO: 32050 - protein, 324 aa, Glycine max
  Clone ID: TF_GmC1813_1.pep
MVRTPSCDKSGMRKGTWTPEEDMKLIAYVTRYGCWNWRQLPKFAGLARCGKSCRLRWMNYLRPNIKRGNFTQQEEECIIRMHKKLGNRWSAIAVELPGRTDNEIKNHWHTALKKRSQQNTLINEETKAIKSKNKESVHNNGVFVTLLATSQISDNSSLSPVSSTCSEFSSITSDLSTAASCMENLVFEDDDLGFLDLYNIDPMNGNLWTELNLDGISFNTPCEIVSGDTNSTFQSSSSSNSNTLDSPHQSTSESIVVNNDFGRFLDSYEEATVDNFWTQSYVADMSHVPSELFVPSVAESEYFTPLYDDLWGQTHLYHENHCLF

SEQ ID NO: 32051 - protein, 146 aa, Glycine max
  Clone ID: TF_GmC148_3.pep
MGRAPCCSKVGLHKGPWTPKEDALLTKYIQAHGEGQWKSLPKKAGLLRCGKSCRLRWMNYLRPDIKRGNIAPEEDDLIIRMHSLLGNRWSLIAGRLPGRTDNEIKNYWNTHLSKKLKIQGTEDTDTHKMLENPQEEAASDGGNNNN

SEQ ID NO: 32052 - protein, 50 aa, Glycine max
  Clone ID: TF_GmC143158_1.pep
MCSRGHWRPAEDEKLRELVERYGPHNWNAIAEKLRGRSGKSCKLRWFNQL

SEQ ID NO: 32053 - protein, 118 aa, Glycine max
  unsure (1)..(118): unsure at all Xaa locations
  Clone ID: TF_jC-gmfl02220131d02a1.pep
MGKSPCDSSHDPXVRKGPWIMVDDLFLINYLADHGECVWNSPAEACGLKRTXKSCRLRLLNYLCPDVRXDTLHPEXQLLIIELHTXWGYTWSKIAKDLPXRTDCVIKCFWRPRIQKPI

SEQ ID NO: 32054 - protein, 307 aa, Glycine max
  Clone ID: TF_GmC274_1.pep
MKWESITLSSPTSCTPNSNTNWLVENNSRSTKWTPEENKLFENALAVHDKDTPDRWHKVAEMIPGKTVVDVIRQYKELEVDVSNIEAGLIPVPGYSSTAISPFTLDWVNTPGYDGFKGCGKRPSSVRPIEHERKKGVPWTEEEHKLFLLGLKKYGKGDWRNISRNFVITRTPTQVASHAQKYFIRQLSGGKDKRRASIHDITTVNLTETITTSCSEDTNRSTSPHVLSQPQQQNSTPTTPRTHFQWTNQSNTGVAMTLNPAHERVFMSPYGANSFGVKIEGQNLHESSYLGPQTQNMVFQMQQSSQH

SEQ ID NO: 32055 - protein, 152 aa, Glycine max
  unsure (1)..(152): unsure at all Xaa locations
  Clone ID: TF_LIB4392-025-R1-K1-C11.pep
MAEVVKSEDCCQENKQSTAASCSSVSEGSGSAXLMSPAICSPASTSPSHRRTTGPIRRAKGGWTAXEDETLRNAVAVFKGKSWKKIAEFFPDRSEVQCLHRWQKVLNPELVKGPWTQEEDDKIVELVSKYGPTKWSLIAKSLPGRIGKQCRE

SEQ ID NO: 32056 - protein, 172 aa, Glycine max
  Clone ID: TF_GmC8312_1.pep
MGRSPCCDKVGLKKGPWTPEEDQKLLAYIEEHGHGSWRALPAKAGLQRCGKSCRLRWTNYLRPDIKRGKFSMQEEQTIIQLHALLGNRWSSIATHLPKRTDNEIKNYWNTHLKKRLDKMGIDPVTHKPKNDALLSTEGPSKIAANISHMAQWESARLEAKARLRRESNLRSS

SEQ ID NO: 32057 - protein, 182 aa, Glycine max
  unsure (1)..(182): unsure at all Xaa locations
  Clone ID: TF_17400850.pep
KRGNFTEHEEKMIIHLQALLGNRWAAIASYLPQRTDNDIKNYWNTHLKKKLKQSGSDEGVDQEGHSSSSSSNSHPKGQWERRLQTDIQMAKKALCDALSLHKPATATATNLVVPDDATKPSSTSHQPYKHASSSYASSYENISRXMENWMKSPNSNSTNNSPGYYSSSFSNMVNNNTTTGSS

SEQ ID NO: 32058 - protein, 337 aa, Glycine max
  Clone ID: TF_GmC1413_1.pep
MGRPPCCDKGVKKGPWTPEEDIILVSYIQEHGPGNWKAVPANTGLSRCSKSCRLRWTNYLRPGIKRGNFTDQEEKMIIHLQALLGNRWAAIAAYLPQRTDNDIKNYWNTYLKKKLNKKLEAGSDQGSLLGGGHNNIGFSSVSQPMSRGQWERRLQTDIHMAKKALSEALSPNKASSSSSTLLAESNSNLSNENSTFYNSNTNKPTTTQSMCYASSADNIARLLKGWMKNTPKSASCAASAVTQNSCSSSEGITTTKGSTTSTSTVELSETFESLFGYESFDNYSSNSEFSPSLSPEATLFQDEGKPDITTGLIDMPFSLLEKWLLDVDAGSQEKLGF

SEQ ID NO: 32059 - protein, 276 aa, Glycine max
  unsure (1)..(276): unsure at all Xaa locations
  Clone ID: TF_GmC1768_1.pep
MGRAPCCEKMGLKRGPWTPEEDQILINYINTYGHANWRALPKLAGLLRCGKSCRLRWINXSCDNYTIACRWSAIAARLPGRTDNEIKNVWHTHLKKRLXKIINKATTRKKRSKKQPKLDVDASKSNQDAKLEQQQEPVNNNFPFHASNSEDMMPLSPPQCSSHMSSSSLTTSDNNGSINNNHDMSLNVNDDIDTPETDAGVDEDFWSEVLSSDNSGETTSGFPTIDYDHQFLPMSPLMTEEGVLIDASSSSVCDDGMDFWCNVYARAEEFTQLLEL

SEQ ID NO: 32060 - protein, 269 aa, Glycine max
  Clone ID: TF_GmC1466_1.pep
MGRRPCCPKEINKGAWSREEDETLSKYVSIHGEGKWQKVAQNAGLKRCGKSCRQRWLNYLKPGIKRGHISVDEEDMIIRLHRLLGNRWALIAKRLPGRTDNEIKNYWNTNLSKKLQKHPTSSVSSLQHKRHEKEKTIQMHVSPEAPRPRRVNAVEYSKNLENGGCGNRPSTTPSPSNKVEGSSEEASFSDFLIHDIDQNQFLIADDSNSKVPQMEEDHPHNNKVELITNNSPSSSSPSDHCHHLLPEKFDPFETLLDVELASFLGFEND

SEQ ID NO: 32061 - protein, 331 aa, Glycine max
  Clone ID: TF_GmC146_2.pep
GRPPCCDKEGVKKGPWTPEEDIILVSYIQEHGPGNWRAVPAKTGLSRCSKSCRLRWTNYLRPGIKRGNFTEQEEKMIIHLQDLLGNRWAAIASYLPQRTDNDIKNYWNTHLRKKLKKMQAGCEGGSFGEGFSASRQIPRGQWERRLQTDIQMAKRALSEALSPEKKPSCLSASNSNPSDSSSSFSSTKPTTTQSVCYASSADNIARMLKGWMKNPPKSSRTNSSMTQNSFNNLAGADTACSSGAKGPLSSAELSENNFESLFDFDQSLESSNSDQFSQSLSPEATVLQDESKPDINIAAEIMPFSLLEKWLLDEAGCQEKLVGCCGDAKFF

SEQ ID NO: 32062 - protein, 329 aa, Glycine max
  Clone ID: TF_GmC1321_1.pep
MEVKGIRASNSTTTTTIQSEDEMDLRRGPWTVDEDLALINYIANHGEGRWNSLARSAGLKRTGKSCRLRWLNYLRPDVRRGNITLEEQLFILELHCRWGNRWSKIAQYLPGRTDNEIKNYWRTRVQKHAKQLKCDVNSKQFKDTMRYIWMPRLVERIQATAAASATTTVTATTATNNAYTYGSNLNNNKFEVHDHKGKMGLTDPSVMNNDLVGSHVTQSYTPENSSTGASSSDSFGTQVSAISDLTEYYTVTVSGNNNNTNSADYYQPSQISYSDSCITSPSGLFPQGLDFQSMDPNTPWNMQSGDSSDSFWNVESMLFLEQQLMNDNM

SEQ ID NO: 32063 - protein, 679 aa, Glycine max
  unsure (1)..(679): unsure at all Xaa locations
  Clone ID: TF_GmC1272_1.pep
RFGSGMSSLDFILMEPAEVAGVNGGKWTDQETLLLLEALELYKENWNEIAEHVGTKTKAQCILHFVQMPIEDTFVDCDDDVDAGCKETADPVATKSDSSMDKDASECIENHTSDGIKDSEKTSKAEDLEVKVNEKETPKLQEGSDEKASEETSKSEDAVKVKIDQEADNDCAINALKXSICFFWFSPGPEGPSSFADVGNPVMALATFLAHLVGSDAAVASAHSSIKSMTRNSPGTELAARCCFLLEDPPDSKKEPTSSERDSKSEGDQDEVNVNQDKSTLEDKDLPNDHNNKKIESNALEDKGKPASTDDGALEKPISSKEQAVVNNECGLDKGHDLNNAKLPNDQAPGTLHNSGGSTSKAEIPPSSDKAQEETLIEEPCPSVKDKHVSDSLLSDKSKDAEMVSNAIPSTKSKPQNPESTNPAHESLETTDSVMDVDGVSNSLPLEKIDSQPLITSKSSQCNGTEKDVEVMSPSNPVRSNSSAENGPNTGAGKDNADNGAKVEDDGTKTKQDSSFEKVKRAAVSTLAAAAVKAKLLANQEEDQIRQLTSLLIEKQLHKLETKLAXFNDVENVVMRAREHVERSRHKLYHERALIIASRLGIPPSSSRGVPPSIPTNRIPTNIANSLPRPQMMMNPPRPLISRPAGTVATIQNPLTPSTAAGNSVRPSNQEKLSSVGTK

SEQ ID NO: 32064 - protein, 208 aa, Glycine max
  Clone ID: TF_GmC116854_1.pep
MGRHSCCYKQKLRKGLWSGSRDEKLLNYITKHGHGCWSSVPKLAGLQRCGKSCRLRWINYLRPDLKRGAFSQQEENSIVELHAVLGNRWSQIAAQLPGRTDNEIKNLWNSCLKKKLRQRGIDPNTHQPLSEIENDKDKPLTADKSNQKASNEVMSHSEPPKPKPIATTATTSMPMDRHPLEVSSTSKISSGNNNSTLYRFDSSITVLI

SEQ ID NO: 32065 - protein, 280 aa, Glycine max
  Clone ID: TF_GmC57353_1.pep
GQISREEIFQAKKRKLSLRCMSCWGTGGQQLQQNYQEETWRLELLVDGIDQEILNWVKDGKYIFLFGGDDPEWVRRFVKEARRVATATQIPLEMVYVGKSNKREQVQKIIDTIIRDKLNTQYWSEQSMIWFFWTRLQSMLFSKLQLKQTDDDDHVMQEIKKLLSYDKQGGWIVLARGSHIVVNGHATTGLQTLVEYDAVWKELADRDGFEPAFKNHYDKVHSIVSPCCRFEFSHSMGRIPERLTCPECRRNMHVLTTFQCCHDEKIDEDFFVSTVTPPTI

SEQ ID NO: 32066 - protein, 415 aa, Glycine max
  Clone ID: TF_GmC692_1.pep
MGRHSCCYKQKRRKGLWSPEEDEKLLRHITKYGHGCWSSVPKQAGLQRCGKSCRLRWINYLRPDLKRGTFSQEEETLIIELHAVLGNRWSQIAAQLPGRTDNEIKNLWNSCLKKKLRQRGIDPVTHKPLSEVENGEEDKTRSQELSNELNLLNSESFKSDEGSYEQRASSSIAPKAYEMEGSCSSKINTTKNDTNLMSNCSNKDMFLDSYTTSCQPSDLMGNYPLQITDTLPTNSNSCHWFSQTARPFDMNSEFTITSNVMSILPPTTTSFLPSTSFCYKPSLGVPSEDISTASFALNGPNYWEASASNNSNGSNNTSDGSRELTTTSSKNSVLSSWGLTEETKWSEYLQNPMLMLAAPESLCNQIRPATHLVPDNTLGSIIVPDSKDQQQQQQSQNSSIFSKDTQKLTAAFGHI

SEQ ID NO: 32067 - protein, 207 aa, Glycine max
  Clone ID: TF_GmC1076_1.pep
FGSSRGRSGKSCRLRWFNQLDPRINRSPFTEEEEERLLASHRIHGNRWAVIARHFPGRTDNAVKNHWHVMMARIRRERSKNYSPKQPLFPPNLQVDLETNFETIPSFVDKYYEKYSHPCVALTHSSFQFPTKNFYFQDPSSAGSTVPRDNCESVEFYDFLQVNTDSNKSEVTDNARRDEEEVSQDAVGMKNKDNGVPFIDFLSTGGC

SEQ ID NO: 32068 - protein, 82 aa, Glycine max
  unsure (1)..(82): unsure at all Xaa locations
  Clone ID: TF_LIB3109-021-Q1-K1-D10.pep
EKMRLKKEPWAIEEDQILRCYIDKHGHGXNWPALSKQASLLRCGKSCILRWINYVRPDVQRRNFTIDEEDTIIELDDMLRNR

SEQ ID NO: 32069 - protein, 104 aa, Glycine max
  Clone ID: TF_jC-gmro02910019d05a1.pep
QQILFPTLGRKKMVQREIRRGPWTEQEDYKLVYFVNMFGDRRWDFIAKVSGLNRTGKSCRLRWVNYLHPDLKRGKLTPQEEHLVMDLHSKWGNRFENHAEIIKL

SEQ ID NO: 32070 - protein, 260 aa, Glycine max
  Clone ID: TF_GmC937_1.pep
MERSLSGSSEEEMSITKGPWTEEEDSVLFNYITVHGEGHWNSVARYTGLKRTGKSCRLRWLNYLRPNVRRGNITLEEQLLILDLHSRWGNRWSKIAEHLPGRTDNEIKNYWRTRVVKQAKQLKCEVNSKQFRDTLRFVWMPRMLERIQAQASSSSSSSSGQAHQTTLISNAQAHSDPCGVMTTNPSLLSEVSSSALDAHAPSLYDSSASYNLMGGGSSSSYSAEYCYYSDIAGNGFGGSDLWTDENICFLQQLLADHDLS

SEQ ID NO: 32071 - protein, 393 aa, Glycine max
  Clone ID: TF_GmC1085_1.pep
VRIPGSAPPFRNHGLSPPVLSHKWGRHSCCVKQKLRKGLWSPEEDEKLFNYITRFGVGCWSSVPKLAGLQRCGKSCRLRWINYLRPDLKRGMFSQQEEDLIISLHEVLGNRWAQIAAQLPGRTDNEIKNFWNSCLKKKLLKQGIDPSTHKPLTEAHVKEEKKIIETSPMQTPLSQGPSVPLIFPSSQGSSLLISDSSYYDGGLTEASREIFMTKPALDPLSYYDFPMGVAQSGFNLPVSQYQTSLKASDQNPFGPNSSYVFSSMPSLTNSDHGNVSVTEFSDNNSASKISSLFMNDQVKESSSNSSNLSTIYHGGGCHISSMMENAGFSWEGDNKFDPLFQFQVNATKSEDFKTSSWEEGQLHTQNSIDFTSFPLTSLSEDLTGANFDVFQHI

SEQ ID NO: 32072 - protein, 154 aa, Glycine max
  unsure (1)..(154): unsure at all Xaa locations
  Clone ID: TF_GmC241740_1.pep
MGRIPCCEKDNVKRGQWTPEEDNKLSSYIAQHGTRNWRLIPKNAGLQRCGKSCRLRWTNYLRPDLKHGQFSDSEEQTIVKLHSVFGNRWSLIAAQLPGRTDNDVKNHWNTKLKKKLSGMGIDPVTHKPXSHLMAEXATTLAPPQAAHLAEAALG

SEQ ID NO: 32073 - protein, 210 aa, Glycine max
  Clone ID: TF_GmC189_2.pep
MGRSPCCEKAHTNKGAWTKEEDHRLISYIRAHGEGCWRSLPKAAGLLRCGKSCRLRWINYLRPDLKRGNFTLEEDQLIIKLHSLLGNKWSLIAGRLPGRTDNEIKNYWNTHIRRKLLSRGIDPATHRPLNDDKVLERCPDLNLELTISPPRQPQSDQHHLKPVGRNSNLCFACSLGLQNSKDHCSCALNTANAASGHDFLALKTSVLEMK

SEQ ID NO: 32074 - protein, 240 aa, Glycine max
  Clone ID: TF_GmC937_2.pep
MERSSEEEMLITKGPWTEQEDSLLFNYITVHGEGHWNSLLSYSHSSRLKRTGKSCRLRWLNYLRPNVRRGNITLQEQLLILDLHSRWGNRWSKIAEHLPGRTDNEIKNYWRTRVVKQAKQLKCDVNSKQFRDTLRFVWMPRMLERIRAQASSSAQAHQSSLISNSNTQAHSGLLSSALHAHAPSLSDSSASYNLMGADAGSCSSHSYYSDIAGNGFGGADLWTDQNICFLQHQLAHHDLF

SEQ ID NO: 32075 - protein, 171 aa, Glycine max
  Clone ID: TF_GmC106208_1.pep
MGRSRLEPIRLEEDPNQRSRRKKNAASGENSESGAAGQGAGEGKKALYHCNYCNKDITGKIRIKCAMCPDFDLCIECFSVGAEVTPHKSSHPYRGMDNLSFPLICPDWNADDEILLLEGIEMYGLGNWTEVAEHVGTKNKESCIEHYRNVYLNSPYFPGPDMSYDGGKNRK

SEQ ID NO: 32076 - protein, 147 aa, Glycine max
  Clone ID: TF_GmC1274_7.pep
MLLSSSCSAAGSAVSGEIMLFGVRVVVDSMRKSVSMNNLSQYELPRDAANAKDDVAAGYASADDAAPINSGKNRDRKRGIPWTEEEHKLFYLGLQKVGKGDWRGISRNYVKTRTPTQVASHAQKYFLRRTNLNRRRRRSSLFDITTD

SEQ ID NO: 32077 - protein, 164 aa, Glycine max
  Clone ID: TF_GmC879133_1.pep
MGRSPCCEENVGVKKGPWTPEEDEKLIDYISKHGHGSWRTLPKRAGLNRCGKSCRLRWTNYLTPDIKRGKFSEEDERIIINLHSVLGNKWSKIATHLPGRTDNEIKNYWNTHIRKKLLKMGIDPETHKPRTDLNHLMSLSQLLGTSNLSSAMNTTWGNNPLGLQ

SEQ ID NO: 32078 - protein, 551 aa, Glycine max
  unsure (1)..(551): unsure at all Xaa locations
  Clone ID: TF_GmC6850_1.pep
MVQDMKQQDNGESKKKERHIVTWTQEEDDILREQIGIHGTENWAIIASKFKDKTTRQCRRRWNTYLNYDFKKGGWSAEEDMLLCEAQKVFGNRKTEIANLVSGRTDNAAKNRFSTLCRKXTIIYIXKKEICTSHINSTNMGLKSQHCNNMDTTSESGVPIKNLRRADIADDAEKIKFEDRSHLRNGTPINQQPRAPLAVLAQNSHNSNNLTDQHHLCNPKFSSSAQNNKIQGTFLKKDDPKISALMQQAELLSSLALKVDTENMDQSLENAWKVLQEFLNRSKESDIPGQKVPDVRLVDLKDMIEELKSGNEEGRVLQELLNRTKESDSTGHKIPDLRPADFKDMVEDSKSGNEEGQVLQEFLNRTNKSDIPEHKIPNLQLVDLKDMIEDLKSGNEEGQACWRKMDCYENSPGSSGYSTGSILICQSASDNLEHSLHQDIGTEMKSKQLEDEKGVKVVMPTANVDQDMVPCCMEQINNDGIVSTSSRLEFSSPLQVTPLFRSLAAGIPSPQFSESERNFLRKTLGMESPSINPSANSSQPPPCKRALLPSL

SEQ ID NO: 32079 - protein, 127 aa, Glycine max
  Clone ID: TF_GmC142212_1.pep
MGRAPCCDKANVKKGPWSPEEDEKLREYIEKHGTGGNWIALPQKAGLKRCGKSCRLRWLNYLRPNLKHGEFSEGEDRIICTLFASIGSRWSIIASQLPGRTDNDIKNYWNTKLKKKMMGVEMNPFST

SEQ ID NO: 32080 - protein, 336 aa, Glycine max
  Clone ID: TF_GmC192_1.pep
MGRQPCCDKVGLKKGPWTAEEDKKLINFILTNGQCCWRAVPKLAGLLRCGKSCRLRWTNYLRPDLKRGLLSEYEEKMVIDLHAQLGNRWSKIASHLPGRTDNEIKNHWNTHIKKKLKKMGIDPVTHKPLSNKTEQTQAQPDEQQTHQPLQEQQEEPIPVEKDTKFEPEKEQNKEPEKPESSIESLTITEEAKEEDQIMTPLFDSWELMNEFCTDEVPIIESNEILVPSAPSSTSPTTTTTTSSSTSTSASSNSNSSNFLEDLLLPDFEWSDDYNDTNFDNNNNSSMALWDDDFIRSWNLLINDDDGDGDRKQVFEAPINQYPRVIMDSDSWAYGLF

SEQ ID NO: 32081 - protein, 336 aa, Glycine max
  Clone ID: TF_GmC100_4.pep
MRKPEVSGNNNNNNNINNKLRKGLWSPEEDDKLMNYMLNSGQGCWSDVARNAGLQRCGKSCRLRWINYLRPDLKRGAFSQQEEELIIHLHSLLGNRWSQIAARLPGRTDNEIKNFWNSTIKKRLKNMSSNTSPNGSESSYEPNNRDLNMAGFTTSNTQDQQHADFMPMFNSSSQSPSMHAMVLNSIIDRLPMLEHGLNMPCSGGFFNSTGPCFSSSQSGVDNKGIYLENGGVFGSVNIGAEGDVYVPPLESVSTTSDHNLKVESTCNTDTNNSYFDDINSILLNNCNINSNNKRAENRAGGVENLFQEELTIGEWDLEELMKDVSSFPFLDFSNIQ

SEQ ID NO: 32082 - protein, 195 aa, Glycine max
  Clone ID: TF_GmC875_2.pep
GESNHGTKASRSDQERRKGIAWTEDEHRLFLLGLDKYGKGDWRSISRNFVVTRTPTQVASHAQKYFIRLNSMNKDRRRSSIHDITSVNNGDISAPQGPITGQTNGSAGNSTAKAAKAATPASTGVPGVGIYAAPTIGQPIGGPLVSAVGTTVNLPAPAHMAYGVRAPVPGAVVPGAPVNMGPVTYPMQHTSVPHR

SEQ ID NO: 32083 - protein, 178 aa, Glycine max
  Clone ID: TF_GmC8609_13.pep
DYGELDGDSWTDQETLLLLEAMEIYNENWNEIAEHVGTKSKAQCILHFLRLPMEDGKLENINVPSMSLSSNAINRDHSGRLHCYSNGDTAGTVHQTRDSDNRLPFANSGNPVMALVAFLASAVGPRVAASCAHAALAVLSEDNSGSTSQMEAPGHDNRTNSENIHSRWWPSWRNSSFK

SEQ ID NO: 32084 - protein, 74 aa, Glycine max
  Clone ID: TF_GmC316_1.pep
MADIDRSFDNNVSAVSTEKSSQVSDVEFSEAEEILIAMVYNLVGERWSLIAGRIPGRTAEEIEKYWTSRFSTSQ

SEQ ID NO: 32085 - protein, 206 aa, Glycine max
  Clone ID: TF_GmC1195_1.pep
MDKKPCNSSSHDPEVRKGPWTMEEDLILINYIANHGEGVWNSLAKASGLKRTGKSCRLRWLNYLRPDVRRGNITPEEQLLIIELHAKWGNRWSKIAKHLPGRTDNEIKNFWRTRIQKHIKQAETSQQHGNSENNDHQASTSTSKVSTMAHPNETFSPPSYQGTFEPFQPQFPTITDQSSCCTTTNDNNNYWSIEDIWSSMQLLNGD

SEQ ID NO: 32086 - protein, 251 aa, Glycine max
  Clone ID: TF_GmC1584_1.pep
EDVEVQEPLEESVDANQEVGGFDLSPRRDKAIPKRNSQLKHKHSAFRASHRGRGVEISSPKEVKATKSWSKHDPVPSAEVKKVRESLKSSSLELRALVKDPLPHALHISDVVRSKLATSDTKTEPLIENQHEDVEVQDPDVCQSIVPFQPNDVNLGKKSFVHCSNIHQPSLMERNRSARTFEWEDSIDNSQQARQPRRRKRKWSSLEEETLRAGVKMFGEGNWATIRSFYSNIFENRSGVDLKDKWRNMIR

SEQ ID NO: 32087 - protein, 128 aa, Glycine max
  Clone ID: TF_17022754.pep
MRNPSSTTTTAATTTTKTKVKNNSNNNIGSNNSPCCNKVGLKRGPWTPEEDEVLANYIKKEGEGRWRTLPKRAGLLRCGKSCRLRWMNYLRPSVKRGHIAPDEEDLILRLHRLLGNRYLYHLLFRFRI

SEQ ID NO: 32088 - protein, 300 aa, Glycine max
  Clone ID: TF_GmC283_2.pep
MELETLYTPCYMPNSNWFVQESLSTEWTREDNKKFESALAIYDKDTPDRWFKVAAMIPGKTVFDVIKQYRELEEDVSEIEAGHVPIPGYLASSFTFELVDNHNYDGCRRRLAPVRGSDQERKKGVPWTEEEHRRFLMGLLKYGKGDWRNISRNFVVTKTPTQVASHAQKYYIRQKVSGGKDKRRPSIHDITTVNLTETSASDKNKPPVIAPQQKLNSMSKVQLDWTSSHYNDGSLMVFNPNSDDLFVSSSSDVTSMALKMQGQDLYECALREAYAKVKVPGFSMAPRDFNNEAVFGIHAL

SEQ ID NO: 32089 - protein, 158 aa, Glycine max
  Clone ID: TF_GmC14594_1.pep
METKDDSAEKEEAWSSHEDEILLNYVQVRGEGNWRNLPKRAGLKRCGESCKQRWLNYLKPTISRGNISLDEHELIIRLHKLLGNRWSIIAGRLPGRTEEEIKNYWNTYLRKEAEENQNNKNEFPSTSMTTTSMSSVQSPWYFRTFRRYQSHGISKSCD

SEQ ID NO: 32090 - protein, 124 aa, Glycine max
  Clone ID: TF_GmC941313_1.pep
HASGWSLIAGRLPGRTDNEVKNYWNSHIRRKLISKGIDPNNHRLKHAIPSSLQNSLMSDDSAEAFRMKDTNKNETSKLPRVYNHVEVSDAASGEAESPCAWPDLNLDLSITNPAASQSMGNNVK

SEQ ID NO: 32091 - protein, 46 aa, Glycine max
  Clone ID: TF_uC-gmrominsoy223d02b1.pep
STGLLRCGKSCRLRWINYLRPDIKRGNFTREEEDTIISLHEMLGNR

SEQ ID NO: 32092 - protein, 265 aa, Glycine max
  Clone ID: TF_GmC600_2.pep
QQILFPTLGRKKMVQQEIRRGPWTEQEDYKLVYFVNMFGDRRWDFIAKVSGLNRTGKSCRLRWVNYLHPDLKRGKLTPQEEHLVMDLHSKWGNRWSRIARRLPGRTDNEIKNYWRTHMRKKKAQEKKHASAASPVSSSCQSSLSSNNHSCYDTGGYDDGMMMGLIGGEKGYSMDDIWKDIMSEEENNIYNNNLQPVYEGHSEEGCNFSCPPPPMIMPSPPSWDQYNISSQPLWVMDEEESNKMLFPTLSDQYFPYYEQGNAFLTG

SEQ ID NO: 32093 - protein, 265 aa, Glycine max
  Clone ID: TF_GmC600_3.pep
VQQDIRRGPWTEQEDYKLVYFVGMFGDRRWDFIAKVSGLNRTGKSCRLRWVNYLHPDLKRGKLTPQEQHLVMDLHSKWGNRWSRIARKLPGRTDNEIKNYWRTHMRKKKALEKKHASASASSPVSSSCQSSLSSNNHVVDSHASKESFYDTGGYDDMMMGLIGGEKGYSMDDIWKDIVLSGEENSIYNNNNLQPVYEEGHSEEGFNFSCPPPMMIMPSPPSWDQYNISSQPLWVMDEEESNKMLFPTLSDQYFSHYEQGNEFLTG

SEQ ID NO: 32094 - protein, 266 aa, Glycine max
  Clone ID: TF_GmC184_2.pep
MYWEVMAGNMGWSVIIEEEGWRKGPWTSEEDRLLIQYVKFHGEGRWNSVARLAGLKRNGKSCRLRWVNYLRPDLKKGHITPQEESIIQELHARWGNRWSTIARSLPGRTDNEIKNYWRTHFKKKTKTPSDAAEKARIRSSRRQQFQQQQQQLKQQQVQQQQQQQQQFQFNLDMKGIINLLEENNHRVPSISQEAQEMASMYPNTSEHQDYFYSMFNVNDNNVSAPECLNEEILWDGLWNLDDVLCNFNAASATSKASLHNLVAPFC

SEQ ID NO: 32095 - protein, 503 aa, Glycine max
  Clone ID: TF_GmC1182_1.pep
MATAESGPRAKIMATTATEPLPSSAEMPPAPPPPKQPPQPVAAASAVKPEAPLSDSKASAEANVIVVPSYSRWFSWDSIDECEVRHLPEFFESASKSPRVYKYYRNSIVKYFRYNPTRKITFTDVRKTLVGDVGSIRRVFDFLETWGLINYHPSSSLTKPLKWDDKETKSDSASNTTESSSAPAKENTKRLCSGCKVVCTIACFACDKYDLTLCARCYVRGNYRVGVNSSDFRRVEISEETKTDWNEKETTNLLEAITHYSDDWKRVSQHVPGRTEKECVAHFLKLPFVDQFQHYQQHPAVNGTDDSCNPLKRVTNADAESELDTVASAEPNKRMRLTPLADASNPIMAQAAFLSALAGSEVAQAAAQAALTTLSEVYKATKINYRSFPRNTLLQDAGIMSNGGNTSDSFQGSRLHANIQLEKEELDVEKAISEIIEVQMKNIQDKLVQFEDLDLLMEKEGQQLEQMKNMFFLDQLTLLFHKSSAPKTGECQEGNNVKTNHGY

SEQ ID NO: 32096 - protein, 321 aa, Glycine max
  Clone ID: TF_GmC1004_1.pep
MKWEMEILPPASPYMYNSNWLLDDNRTNNTKWTPAENKLFENALAVYDRDTPDRWHKVAEMIPGKTVMDVVKQYKELEADVCDIEAGLIPIPGYSSGTTTTSPFTLDWVNTSPAYDDGFKGITAKRSSSGRPLEQERKKGVPWTEEEHKLFLLGLKKYGKGDWRNISRNYVITRTPTQVASHAQKYFIRQLSGGKDKRRASIHDITTVNLTETTRTSSDESKRSASPQNSAMLSRHQQLNSNAASSGLNFQWSDQPNAGVAMALNPAHEQVFMSPYGLNSYGFKMQGQNLHRSSLHESSYLGPQTPNMVFQMQPSQHYSHA

SEQ ID NO: 32097 - protein, 303 aa, Glycine max
  Clone ID: TF_GmC143_1.pep
MEFLDEDARPRFVFQSGAAARSSEPPHPIHKPTKPFLFATVSLSSLFLTLSLFFLEAEPFKSLLFWLALSLLVGPFAPPSITGGDVRVGRGEVVNFPDPEPEPDEDASRKSSQRRSRQRRAEEASAAVGPVVSVSAAEKRKESSGIEKRATVVEEEKGWSEEDVEVLKKQMVKNPVGKPGRWEAIAAAFGGRHGVDSVIKKAKELGEKRVDDSESYALFLKKRKALDKRVVEENADEGEKVVDNGWSSAEDIALLNALKAFPKEVSMRWEKVAAAVPGRSKAACMKRFAELKKGFRTAKAAAE

SEQ ID NO: 32098 - protein, 360 aa, Glycine max
  unsure (1)..(360): unsure at all Xaa locations
  Clone ID: TF_GmC1274_1.pep
MLIFLKSKSIIPGSSPYVTITHPYRNSRAASLCLNFPSFSLFLSPSHALGSTRTNSDPPPSHTQPAPPPDPTMSRASSAADSAASGEIILFGVRVVVDSMRKSVSMSNLSQYEHPQDATNNKDALAAGYASADDAAPQNSGRLRERERKRGVPWTEEEHKLFLVGLQKVGKGDWRGISKNYVKTRTPTQVASHAQKYFLRRSNLNRRRRRSSLFDITTDTVSAIPMEGEQVQNQDTLCHSQQQSPVFPAETSKINGFPAMPVYQFGVGSSGVISVQGALXNPMEELTLGQGNVEKHNVPNKASTVSGIITPGSSSSAIDPPPTLSLGLSFSSDQRQTSSRHSALHAMQCFSNGDSIISVA

SEQ ID NO: 32099 - protein, 233 aa, Glycine max
  Clone ID: TF_GmC344_2.pep
MGGRQMLLEQAKVLRDALSSKKEEAVDEKTNQQNANGSIKANGSPSLSNIEKKEKPWSKEEIDLLRKGMQKYPKGTSRRWEVISEYIGTGRSVEEIMKATKTVLLQKPDSSKAFDTFLEKRKPGAQSIESPLTTREELGVPAPASSTNNAEDSQNKGTDDQNSPANGVSSSSEQDVWSAVQERALVQALKAFPKETSQRWERVATAVPGKTVNQCKKKFALMKESFRNKKTAV

SEQ ID NO: 32100 - protein, 318 aa, Glycine max
  unsure (1)..(318): unsure at all Xaa locations
  Clone ID: TF_GmC1167_1.pep
MVGGHKKKKRCSEFASKNKDHKMGNHCRCILVCQSTGQGTALDGQITSCQEPRHGTSNSRTVDTNTGLSRCSKSCRLRWTNYLRPGIKRGNFTPHEEGMIIHLQALLGNKWAAIASYLPQRTDNDIKNYWNTHLKKKLKKFQAALDPHSASDSTASXSISTKELYHHQSQSSSTTTYASSTENISRLLEGWMRSSPKQLNKGSSSQDDEDIQLQGINDDDKNNNNFESTTKLVNLHHLQHKVRNKDEHQEEKSSEASAAADHHHHHHHDIAAAHERNNVRQKSENSSGAPPLSFLEKWLLDENVGHQVEEMMELSPMF

SEQ ID NO: 32101 - protein, 104 aa, Glycine max
  unsure (1)..(104): unsure at all Xaa locations
  Clone ID: TF_jC-gmXLIB3563P045ah05a2.pep
MMAAARKELDRIKVPWNTDEDEDLHKLEERHGPKNWSLIIMSIPWRSGKSCRLHWCNQLYGQVEHRAFTPXEDKTIIKAHAKFVFNXATITRLLXTRTDNAIKN

SEQ ID NO: 32102 - protein, 133 aa, Glycine max
  Clone ID: TF_uC-gmroLIB3258P126b12b1.pep
MVQDMKQQDNGESKKKERHIVTWTQEEDDILREQIGIHGTENWAIIASKFKDKTTRQCRRRWYTYLNSDFKKGGWSAEEDMLLCEAQKVFGNRWTEIAKVVSGRTDNAVKNRFSTLCRKKQKYAALAKENSTL

SEQ ID NO: 32103 - protein, 312 aa, Glycine max
  Clone ID: TF_GmC1812_1.pep
MSTSKSVSSSSEDDNELRRGPWTLEEDNLLSQYIFNHGEGRWNLLAKRSGLKRTGKSCRLRWLNYLKPDVKRGNLTPQEQLIILELHSKWGNRWSKIAQHLPGRTDNEIKNYWRTRIQKQARHLKIYTDSREFQELVRRFWMPRLLQKAKESSSSNMSIQNQAIPMPFDYVSQHLTVGTIPPWQGPCMNEAGPTYMDQHEQNSDSEHNNGSCISLSESANFPKVPQHFGRTTITQYHALNNNDFGTFTYDGYNVSNNVYEMDNFKTPTTRVAEDAQYPTGDCQMVGSNWVNSDFACNMWNMDELWQFSKLQK

SEQ ID NO: 32104 - protein, 171 aa, Glycine max
  Clone ID: TF_uC-gmflLIB3275003f07a1.pep
YFCYHGPWTAEEDKKLINFILTNGQCCWRALPKLAGLLRCGKSCRLRWTNYLRPDLKRGLLSEYEEKMVIDLHAQLGNRWSKIASHLPGRTDNEIKNHWNTHIKKKLKKMGIDPVTHKPLSNKTEETQAQPDEQTHQPLQEQQQQQHQHQQQPIPVEKDLKFEPEKEQNRE

SEQ ID NO: 32105 - protein, 636 aa, Glycine max
  Clone ID: TF_GmC344_4.pep
MAVHTEFPLITYSQEIVDGQPIFVSSNCLPIKALKFEPAGHSFHSAALKLLGVQEDNNDADDKKVVDDKEQTYLPSDSYSSKSKKKTGTGDMQQDHYALLGLGHLRYLATEDQIRKSYRETALRFHPDKQAALLLAEETEAAKQAKKDEIESHFKAIQEAYEVLIDPVKRRIYDSTDEFDDEIPTDCAPQDFFKVFGPAFMRNGRWSVNQPIPSLGDDNTPLKEVDNFYNFWYSFKSWREFPHADEFDLEQAESRDHKRWMERQNAKLTEKARKEDYARIRTLVDNAYKRDPRRLRRKEEEKAEKQRKKEAKFLAKKVQEEEAARIAEEERQRKEEEERQAAKAALQQKKVKEKEKKLLRKERARLRTLSGPILSQHLLDISDDDVERLCMSLDIEQLRSLCENMEGRQMLLEQAKVLRYALSSKKEEVVDEKTNQQNANGSIKANGISSLSNIEKKEKPWSKEEIDLLRKGMQKYPKGTSRRWEVISEYIGTGRSVEEIMKATKTVLLQKPDSSKAFDTFLEKRKPGAQSIESPLTTREELGVPAPASTNNVEDSQNKSTDNQNSPANGVSSSSEQDVWSAVQERALVQALKVFPKETSQRWERVATAVPGKTVNQCKKKFALMKESFRNKKSAV

SEQ ID NO: 32106 - protein, 301 aa, Glycine max
  Clone ID: TF_GmC503_1.pep
NSARADLKRGMFSQQEEDLIISLHEVLGNRWAQIAAQLPGRTDNEIKNFWNSCLKKKLMKQGIDPATHKPLLSAQEHIIIKEEKETILETPPPMLLPMSQGILASSQESPLVVNNSSYCDGGLNVTEAASREVFMSKNAALDPLSYFEFQMGYNPIRQFDQNHVGTNSSYGFSSLPCLNSSSDHGNVSVAAEFSDNNSASKISSLMKESSSNSSSMSVYPAGGGCQMMENAGFSWDGENNNTKIDPLLQFHVNVLKSEEFKTSSWQEEQILTQNLIDFTNYPLMSLSEDLTGANFDVFQQM

SEQ ID NO: 32107 - protein, 57 aa, Glycine max
  Clone ID: TF_uC-gmrominsoy034e07b1.pep
DESVENGELEDAPKLTLQTTDQELVNDYWCKKCAVQPSWVPIINYVDVNKKDPWKRS

SEQ ID NO: 32108 - protein, 159 aa, Glycine max
  unsure (1)..(159): unsure at all Xaa locations
  Clone ID: TF_GmC642_10.pep
SIFANFLYRSWLIDIGGFAKKVKSTTLSSADQIKDCGAYRECPNCSYHIDNSDVSTEWPGFPLGVKFDPSDVELLEHLAAKCGIGNTQQHMFINEFIPTLEGDQGICYTHPENLPGAKKDGSYVHFFHRTTNAYATGQRKRRKIHXNRVLTEEHVRWHK

SEQ ID NO: 32109 - protein, 93 aa, Glycine max
  Clone ID: TF_uC-gmroLIB3259P159h08a1.pep
VAKENQIIHSESIQVIGMKETLFFCKGPHEQRLQWVMHELRLVASYPCQMPVADFAVYRIFQKNKMKTRRSHGKKPSSSSKLQRLVDVKASGF

SEQ ID NO: 32110 - protein, 54 aa, Glycine max
  unsure (1)..(54): unsure at all Xaa locations
  Clone ID: TF_LIB3242-770-P1-J1-D1.pep
RVLLKWKTFLLXXRREYXIDLPAXFLFHXTYEELIIHYLYKKVIYTXFFSKAYL

SEQ ID NO: 32111 - protein, 88 aa, Glycine max
  Clone ID: TF_uC-gmropic072f11b1.pep
LSTTATTTVNTTANPAPAPPTALATCFAPRSRVHETDEELVKHYVKRKGCGKSALSDAVSDGDIHRSEPCELRDKTREQKRDQERALF

SEQ ID NO: 32112 - protein, 127 aa, Glycine max
  unsure (1)..(127): unsure at all Xaa locations
  Clone ID: TF_LIB3092-021-Q1-K1-B7.pep
EKPADRRVRTRQFSSSSSFLTSIITTSAAFFDKIELPFTKIEPPKKDPLSQLTLPPCXPFYPTDNELLVQHLCPKVASHHFSLTIITQIDLYKFNPPNLTIKTNFNEKKXYFFSPKHMKFPNRFSPN

SEQ ID NO: 32113 - protein, 48 aa, Glycine max
  Clone ID: TF_jC-gmXLIB3563P084ad08a1.pep
SVGIGHRNCDLQDRHFFIPKEAKYRNGNRMNRTQSVDIERQQAQTKKY

SEQ ID NO: 32114 - protein, 59 aa, Glycine max
  unsure (1)..(59): unsure at all Xaa locations
  Clone ID: TF_uC-gmrominsoy306c04b1.pep
SCGWKSRAAYEKLVVCWVCLKGSYEHIEVNIINDMDLYNXEPWDLPGMVLYGEKEWFFF

SEQ ID NO: 32115 - protein, 39 aa, Glycine max
  Clone ID: TF_700874479H1.pep
RDPLALLSLPPGLRVYPTDEELLVQYRFCIVSCHHCSLP

SEQ ID NO: 32116 - protein, 81 aa, Glycine max
  unsure (1)..(81): unsure at all Xaa locations
  Clone ID: TF_9901760.pep
WPAGFMSHPTDNELVWQFLRRKVVCCPLTIFIIPEVDVCKFDPWDISGDIESEXFSICTEDAGYIIGNRSNIAPYYWQTIA

SEQ ID NO: 32117 - protein, 141 aa, Glycine max
  Clone ID: TF_uC-gmroLIB3259P208f01a1.pep
GGSKNLNWQRFFFHDLRTRVFENLNKREAGIGQWRAIEKAQDFELSKEQVVARKNVLAFWEAKGNGFAKSNWVMHEFRLVSKSHPSMVSAMAVYRIFKTKKEERERRQKGLKGRPLAAAAVRKKLWMRHPLSLISQWRMAL

SEQ ID NO: 32118 - protein, 284 aa, Glycine max
  unsure (1)..(284): unsure at all Xaa locations
  Clone ID: TF_GmC207_1.pep
MGSFLNFLLDSTFTNIHSFSLIFHLHHIFFNFISFFTKISFFLFFLFSFSFLIYIYIYIYIYIYIYIYIYIYIYIYIYISKDGQIRHFFHRPSKAYTTGTRKRRKVHTDDEGIETRWHKTGKTRAVFAXSGGAVKGFKKILVLYTNYGRQKKPEKTYWVMHQYHLGSTEEEKDGELVVSKVFYQTQPRQCGNPIIIKDSYEKMLNDGSGQDNINISLIPKTTATLLDCYTAPYIDYDHVHVSHNRESSSQLIIPSSVVQVDGSYIRLTMDAKKARFESNTGKRF

SEQ ID NO: 32119 - protein, 45 aa, Glycine max
  Clone ID: TF_LIB3242-524-P1-J1-A6.pep
PWNVPDWFNFFHGDSKNLTSKWLIRTTNCKYWNVTAKDRDIITVD

SEQ ID NO: 32120 - protein, 48 aa, Glycine max
  unsure (1)..(48): unsure at all Xaa locations
  Clone ID: TF_jC-gmfl02220081f01a1.pep
MDIDIHTCEQWRLPVVAXLNANERSFFCXRDRKYATGLGTNTATTCGY

SEQ ID NO: 32121 - protein, 124 aa, Glycine max
  Clone ID: TF_GmC432953_1.pep
MTWCNDSDEERGIDQLVALTITPTSTNNTTVLTDHHTKASEIRTLTCPSCGHNIEFQDQTGINDLPGLPAGVKFDPNDQEILEHLEAKVFSDVPKLHPLIDEFIPTLEGENGICYTHPEKLPGV

SEQ ID NO: 32122 - protein, 120 aa, Glycine max
  unsure (1)..(120): unsure at all Xaa locations
  Clone ID: TF_LIB3138-042-Q1-N1-C2.pep
VVPLGTVHGDFKPYFSGTISKRPLTHLFISLADGFVRPIAACPYSKLAPCDRFHRNDEELILDXRIATVASVRLSAHIIAEADIYMLDPWDYPANATYVEQEWYLLSPRDGKHPNGAGPY

SEQ ID NO: 32123 - protein, 211 aa, Glycine max
  unsure (1)..(211): unsure at all Xaa locations
  Clone ID: TF_LIB4128-056-Q6-K1-H2.pep
KQTPMFHRVMPTGFRIYPTDXEELLMEYXSPKVAGHHYXVAYIGEYGWDRCDPWGLPGSSIFGEKECCFFXPEYRRYPNGSRPNTGSGSGYWXKPTETNEIMTTRXPNDYIRKVLVLYFGKNLKGTITXVIMHEYRLLDSSRKNTVPSXDDCVLCXIYNMNCCAQKTAQNGVDPSDELTLYSNGYSLSSSTQLEDYLESLPSIDERCFTMP

SEQ ID NO: 32124 - protein, 84 aa, Glycine max
  unsure (1)..(84): unsure at all Xaa locations
  Clone ID: TF_21994330.pep
HPSPLHFFSLXSPFLIITPHSSPSLPXYPSHIIPFPSXYPSNXLPHYPXXSLTLFHPSPFFSFKNTTPSLQPILFHXPPPPPTX

SEQ ID NO: 32125 - protein, 90 aa, Glycine max
  unsure (1)..(90): unsure at all Xaa locations
  Clone ID: TF_LIB3170-055-Q1-K1-C1.pep
LHFPYVFRPYSTQKYIISVEKVNTAKNGELILPPELRFHPTDEELVMQYLERKDFSXPVPACIIPELHVRQCDPWDLPRDLEQERYLFST

SEQ ID NO: 32126 - protein, 77 aa, Glycine max
  unsure (1)..(77): unsure at all Xaa locations
  Clone ID: TF_jC-gmle01810023f12a1.pep
MGVPERDPAAQASQATGCRSYPTDDERLVQVLCRKAAGHHLSVAVVADDDLYKYDPWALSGXAVFGEKEWFFLRPGD

SEQ ID NO: 32127 - protein, 117 aa, Glycine max
  Clone ID: TF_uC-gmflminsoy023h05b1.pep
ILFLSLFQSSLMLISTSLIHGNYQLDDWVLCRIYKKGNTQRSHERDDSIDDMIGEVPPSINVGHMSARFHLSRMSTSYSGALLENDRNTLEGVVIGNGSVNGISNTNNITSVISSSQ

SEQ ID NO: 32128 - protein, 156 aa, Glycine max
  unsure (1)..(156): unsure at all Xaa locations
  Clone ID: TF_GmC126188_1.pep
MEEPIVVNKGEEPLDLPPGFRFHPTDEEIITYYLTEKVRNSSFSAIAXGEADLNKCEPWDLPKKAKIGEKEWYFFCQKDRKYPTGMRTNRATESGYWKATEKIXEIYKGKGNLVGMKRTPRFYERRAPKGEKGYWVIDEIRSEGQWDATNLPRARR

SEQ ID NO: 32129 - protein, 398 aa, Glycine max
  Clone ID: TF_GmC642_6.pep
MARSWLIDIGGFAKKVKNTTLSTDDQMKDCGTYRECPKCHYHIDNSDVSHEWPGFPVGVKFDPSDVELLEHLAAKCCIGNREPHMFIHEFIPTLEGEQGICYTHPENLPGAKKDGSYVHFFHRTTNAYATGQRKRRKIHHQQGLTEEHVRWHKTGKTKAIIEDGAHKGFKKIMVLYVRSSENGSRSYKSNWVMHQYHLGTVEEEKEGEYVVSKIFCQQQKQTEKNEGNPMAEDPDNIISRTGPRTPKPNPPNPPRAGKSVDCDDNIDETVLLSSALDTKTIPGESHAPQSDIQDQDFTGNAAWLAGESQAEESTKYDGCDDILLCKEILDSSAILNDPGLDSTNLEDIAGYATQRARNDNESCGISVLDSLELDTPDFDLSSLYFCSQDSILDWMDRL

SEQ ID NO: 32130 - protein, 123 aa, Glycine max
  Clone ID: TF_18730400.pep
DMEERNHDGEKLDEVMLPGFRFHPTDEELVGFYLKRKIQQRPLSIELIKQLDIYKYDPWDLSKMATTGEKEWYFFCPRDRKYRNSARPNRVTGAGFWKATGTDRPIYSSEGSKCIGLKKSLVF

SEQ ID NO: 32131 - protein, 296 aa, Glycine max
  Clone ID: TF_GmC1124_1.pep
MGLRDIGASLPPGFRFYPSDEELVLHYLYKKITNEEVLKGTLMEIDLHTCEPWQLPEVAKLNANEWYFFSFRDRKYATGFRTNRATTSGYWKATGKDRTVFDPATREVVGMRKTLVFYRNRAPNGIKTGWIMHEFRLETPHLPPKEDWVLCRVFHKGKADNSAKLIMYESTVPSLTLASSSPTNQNTTPSIGYNQFLAPFSSSMATHHHNHNHHIPNQSQNNNNNSLMGLLQFSRETNTNNSSTVTQISPKCDDNNGYGFLWDMDLEENSFNDGVASNLDGMRFFELDNNNSVVLL

SEQ ID NO: 32132 - protein, 508 aa, Glycine max
  unsure (1)..(508): unsure at all Xaa locations
  Clone ID: TF_GmC580_1.pep
MGSVDCYPSRTDDAAVVSLDSLPLGFRFRPTDEELVNYYLRQKINGNGRXVWVIREIDFCKXETWDMLGLSVVQTKDPEWFFFCPQDRKYPNGHRLNRATNNGYWKATGKDRRIKSGKDLIGMKKTLVFYTGRAPKGNRTNWVMHEYRPTLKELDGTNPGQNPYVLCRLFKKHDESLEVSHCDEAEQTASTPVAYSTEEIQSDLAVVAGSPSQVTEDDKHQAMIPAHSEEAISNVVTPVVCRSDRYDACHAPNQIVLPTAEEFQPLNYYDPRNELLDDKLFSPVLAHIQPEFHYQANIESDDWYGLQYGTNETNMSDFLNSVVNWDQVSFEDLNCQQQSYPLFNVKDSILSSDLDSELANMTCMQAGYAEGAIDGRKPLVITSEFCSTTGIPVDCVGDEQKSNVGLFQNNSQRAFTDVNIGQVYNVVDDYEQRGICSAVASGNTGIIRRHREVQNEQLSSNSTQGTAQRRIRLSMATHGSNKMVKSGSCAQEELNLKSVIAMVRILFF

SEQ ID NO: 32133 - protein, 95 aa, Glycine max
  Clone ID: TF_GmC451863_1.pep
MSKISNWSSVSSSDLIDAKLEEHQLCGSKQCPGCGHKFEGKPDWLGLPAEVKFDPTDQELIEHLEAKVEAKNMKSHPLIDEFIPTIEGEDGICYT

SEQ ID NO: 32134 - protein, 253 aa, Glycine max
  Clone ID: TF_GmC416_2.pep
MEFLPPGFRFYPTEEELVVFYLHNQLEGQIHDTSRVIPVTDINGVEPWNLPTLAGEFCRGDTEQWFFFSPRQEREARGGRPNRTTASGYWKATGSPGHVYSSDNKVIGMKKTMVFYKGKAPTGRKTKWKMHQYKAIEHSHQSNTAPPKLRHEFSLCRVYVISGSFRSFDRRPLEMPRIELRVDGDRGAASTSTQQRAAVVDGLSSSDTSSHSGGGRGGSHISEAGAGSSGTNWNASNSRVEEPLWEWEQLNWP

SEQ ID NO: 32135 - protein, 153 aa, Glycine max
  Clone ID: TF_GmC625_16.pep
MPGELQLPPGFRFHPTDDELVNHYLCRKCAAQTIAVPIIKEIDLYKFDPWQLPEMALYGEKEWYFFSPRDRKYPNGSRPNRAAGSGYWKATGADKPIGKPKALGIKKALVFYAGKAPKGVKTNWIMHEYRLANVDRSASKKKHHHQQLEGMSR

SEQ ID NO: 32136 - protein, 108 aa, Glycine max
  Clone ID: TF_GmC525_5.pep
MEKVSFVKNGELRLPPGFRFHPTDEELVLQYLKRKVFSCPLPASIIPEVDVCKSDPWDLPGDLEQERYFFSTKEAKYPNGNRSNRATNSGYWKATGLDKQIVTSKGNQ

SEQ ID NO: 32137 - protein, 370 aa, Glycine max
  unsure (1)..(370): unsure at all Xaa locations
  Clone ID: TF_GmC424_2.pep
MGVPEKDPLSQLSLPPGFRFYPTDEELLVQYLCRKVAGHHFSLPIIAEIDLYKFDPWVLPSKAIFGEKEGDFFSELNKFDXLIFAGKAIFGEKEWYFFSPRDRKYPNGSRPNRVAGSGYWKATGTDKIITTEGRKVGIKKALVFYIGKAPKGTKTNWIMHEYRLLDSSRKNTGTKLDDWVLCRIYKKNSSAQKAVQNGVVPSNEHTQYSNGSSSSSSSQLDDVLESLPAIDERCFPMPRVNTLQQQQHEEKVNVQNLGEGGLLDWTNPSVLNSVVDFVSGNNNHNQLVQDQTQGMVNYNACNDLYVPTLCHVGTSVPQKMEEEVQSGVRNQRVQNNSWFLQNDFTQGFQNSVDTSGFKYPVQPVGFGFRN

SEQ ID NO: 32138 - protein, 118 aa, Glycine max
  Clone ID: TF_GmC625_8.pep
AVPIIKEVDLYKFDPWQLPEIGYYGEKEWYFFSPRDRKYPNGSRPNRAAGSGYWKATGADKAIGKPKALGIKKALVFYAGKAPKGVKTNWIMHEYRLANVDRSASKKNNNNLRVCPKL

SEQ ID NO: 32139 - protein, 298 aa, Glycine max
  Clone ID: TF_GmC625_19.pep
MPGELQLPPGFRFHPTDDELVNHYLCRKCAAQTIAVPIIKEIDLYKFDPWQLPEMALYGEKEWYFFSPRDRKYPNGSRPNRAAGSGYWKATGADKPIGKPKALGIKKALVFYAGKAPKGVKTNWIMHEYRLANVDRSASKKNTTTNNLRLDDWVLCRIYNKKGKIEKYNGVAVVDQKVAKLSEEEVQFQHETKPQIKMYGHDDFRNDQLYMDTSDSGPRLHTDSSCSEHVVSPDGTCEKEVQSEPKWNDLELGPDPALGFDFNFMDLTSDDAFAPQVQYQINHLSPWQEMFTYLPKTF

SEQ ID NO: 32140 - protein, 106 aa, Glycine max
  unsure (1)..(106): unsure at all Xaa locations
  Clone ID: TF_GmC54821_5.pep
IESMARMGPGFRFHPTDEELVVFYLKRKMTGNLSRYDHIAVVDVYKLEPWDLPSLSKLKTKDLEWYFFSALDRKYGNGSRTNRATERGYWKTTGKDRXVTHGERTV

SEQ ID NO: 32141 - protein, 300 aa, Glycine max
  Clone ID: TF_GmC195_2.pep
MASELQLPPGFRFHPTDQELVLHYLCRKCASQPIAVPIIAEIDLYKYDPWDLPGLASYGEKEWYFFSPRDRKYPNGSRPNRAAGTGYWKATGADKPIGHPKPVGIKKALVFYAGKAPKGDKSNWIMHEYRLADVDRSVRKKNSLRLDDWVLCRIYNKKGTIEKFQPSSDVVVSRKMESSEIEDRKPEILKSGGGCLLPPVPPPQAKAAVKTDYMYFDPSDSIPKLHTDSSCSEHVVSPEFASEVQSEPKWKEWEKSLEFPFNYVDATLNNSNSFTTQFQGNNQMMSPLQDMFMYWPNKPF

SEQ ID NO: 32142 - protein, 343 aa, Glycine max
  Clone ID: TF_GmC424_3.pep
MGVPEKDPLSQLSLPPGFRFYPTDEELLVQYLCRKVAGHHFSLPIIAEIDLYKFDPWVLPSKAIFGEKEWYFFSPRDRKYPNGSRPNRVAGSGYWKATGTDKIITTEGRKVGIKKALVFYVGKAPKGTKTNWIMHEYRLLDSSRKNTGTKLDDWVLCRIYKKNSSAQKTAQNGVVPSNEHTQYSNGSSSSSSSQLEDVLESLPSIDERCFAMPRVNTLQQQQHHEEKVNVQNLGAGGLMDWTNPSVLNSVADFASGNNQVVQDQTQGMVNYNCNDLYVPTLCHLDSSVPLKMEEEVQSGVRNQRVGNNNSWFLQNDFTQGFQNSVDTCGFKYPVQPVGFGFRN

SEQ ID NO: 32143 - protein, 465 aa, Glycine max
  Clone ID: TF_GmC834_1.pep
MGRETMCLPTPPTTATTTVNPVPPPAPAPPTSLAPGFRFHPTDEELVIYYLKRKVSGKSFRFDAISEVDIYRSEPWDLADKSRLKTRDQEWYFFSALDKKYGNGGRMNRATSKGYWKATGNDRPVRHDQRTVGLKKTLVFHSGRAPDGKRTNWVMHEYRLVEEELERAGSGSSQPQDAYVLCRVFHKNNIGPPNGQRYAPFIEEEWDDASGMVPGADPGDNRSFAHQPHVEGKGGVLCAEGRNGAVQDTQSFNKAPFDVNKLPIETQNLLAVCKRESMAEYPSPEKDDNNCKHMDDYPSPQTDNPKPFSQIYKRRRHNLNSNNSHVSGDSIRTSQDPCSSTITTAATALPTTNAAAGTATNTAPKKHFLSALVEFSLLESLESKDSLASIKTPDFDVENLESSMPPSCAKFIKEMKSEMQKLSVEKETMRFEMMSTQAMINILQSRVDVLSKENEDLKRMVAQNP

SEQ ID NO: 32144 - protein, 354 aa, Glycine max
  unsure (1)..(354): unsure at all Xaa locations
  Clone ID: TF_GmC1311_2.pep
MDSSSSGSQLSQHPQLPPGFRFYPTDEELVVHYLKRKADSVPLPVSIIAEVDLYKFDPWELPSKATFGDQEWYFFSPRDRKYPNGSRPNRAASSGYWKATGTDKPILASHGHHHKVGVKKSLVFYGGKPPKGVKTNWIMHEYRLADSNSNSSSKPPSMASDHAQSCKKNSLRLDDWVLCRIYKKSNSTNLPRLPLVEQNKELSMLPMRSTLSMANNNTSQDSKPTSSISTSYGPLGVENDDNLFDGILGVDHQSMXHDVSDSQQVSSKGNFPMKRELSSQYFWNDTGSSSSSRRFHCDLNYAGSSTVEEDNSFVSLLSHLSQNTTSFHPNALLGPIGNGVLRQQFQLPSMNWNT

SEQ ID NO: 32145 - protein, 179 aa, Glycine max
  Clone ID: TF_GmC7703_4.pep
FACWVWGVLVVDLSVVRNKDPEWFFFCPQDRKYPNGHRLNRATNHGYWKATGKDRKIKSGTILIGMKKTLVFYTGRAPKGNRTNWVMHEYRPTLKELDGTNPGQNPYVLCRLFKKHDESLEVSHCDEAEPTASTPVAAYYSTEEIQSDLAVVAGSPSQVTEDDKHQSMIPAHSEEAISN

SEQ ID NO: 32146 - protein, 216 aa, Glycine max
  unsure (1)..(216): unsure at all Xaa locations
  Clone ID: TF_700736976_FLI.pep
MEKVNFVKNGELRLPPGFRFHPTDEELVLQYLKRKVFSCPLPASIIPELHVCKXLEQERYFFSTKVAKYPNGNRSNRATNSGYWKATGLDKQIVTSKGNNQVVGMKKTLVFYRGKPPNGSRTDWIMHEYRLILNASQSQSHVVPMENWVLCRIFLKRRIGAKNGEESNSKVVFYDFLAQNKTDSSSSVASGITHESDEHEESSSSNTFPYTIRRKP

SEQ ID NO: 32147 - protein, 244 aa, Glycine max
  Clone ID: TF_GmC416_1.pep
MDDLPPGFRFYPTEEELVFFYLHNQLEGQIHDTSRVIPVIDINGVEPWNLPSLAGELCRGDTEQWFFFSPRQEREARGGRPNRTTASGYWKATGSPGHVYSSDNKVIGMKKTMVFYKGKAPTGRKTKWKMHEYKAIEHSDQSNTAPPKLRHEFSLCRVYVISGSFRSFDRRPLDMPRVELRVVDGDRGAASTSAQAQQRSSSHTSHSGGDAHVTDAGAGSSGTNWNASNRVEEPLWEWEQLDWP

SEQ ID NO: 32148 - protein, 275 aa, Glycine max
  unsure (1)..(275): unsure at all Xaa locations
  Clone ID: TF_GmC525_1.pep
MEKVNFVKNGELRLPPGFRFHPTDEELVLQYLKRKVFSCPLPASIIPELHVCKSDPWDLPGDLEQERYFFSTKVAKYPNGNRSNRATNSGYWKATGLDKQIVTSKGNNQVVGXKKTLVFYRGKPPNGSRTDWIMHEYRLILCLSATGLDKQIVTSKGNNQVVGMKKTLVFYRGKPPNGSRTDWIMHEYRLILNASQSQSHVVPMENWVLCRIFLKRRIGAKNGEESNSKVVFYDFLAQNKTDSSSSVASGITHESDEHEESSSSNTFPYTIRRKP

SEQ ID NO: 32149 - protein, 115 aa, Glycine max
  unsure (1)..(115): unsure at all Xaa locations
  Clone ID: TF_uC-gmropic111g01b1.pep
TTRSSDYRGKEWGFFSPRDRKYPDGSXRPNRVAGSGYWNVTGSRGIITTEGRNVGIKKAFVFYGGKAPKGTKTNWIMHEYRLLNCSRKNTGTKVYSYTYTHAHTLLLNGLTPSIN

SEQ ID NO: 32150 - protein, 98 aa, Glycine max
  Clone ID: TF_GmC580_6.pep
MGSVDCYPSRVDDAAVVSLDSLPLGFRFRPTDEELVNYYLRQKINGNGREDWVIREIDVCKWEPWDMPGLSVVQTKDPEWFFFCPQDRKYPNGHRMNR

SEQ ID NO: 32151 - protein, 307 aa, Glycine max
  Clone ID: TF_700954809_FLI.pep
ELPAMASFGAEEWYFFSPRERKYPNGARPNRAATSGYWKATGTDKPICSGTQKVGVKKSLVFYGGKPPKGVKTDWIMHEYRVAENKPNNRPPGCDLGHKKNSLRLDDWVLCRIYKKGNTQRSHERDDSMDDMIGEVPPSINVGHMNARFHLSKMSTSYSGALLENDRNTLEGVVIGNGNVNGINTNSINAISSSSSHHQFASSNSKAELLPFAPSNNNTSNSASKRTLSSLYWNVDDDNDDDDHKHFNLDSNGNVSVLRTEENNNNTNGTSGSFATLLNQLPQTPSLPQIDGLLRTPYQIQGTNWYG

SEQ ID NO: 32152 - protein, 357 aa, Glycine max
  Clone ID: TF_22597157.pep
MENVSVLLCNKEKDQMDLPPGFRFHPTDEELISHYLYRKVTDTNFSARAIGEVDLNRSEPWDLPWKAKMGEKEWYFFCVRDRKYPTGLRTNRATESGYWKATGKDKEIFRGKSLVGMKKTLVFYKGRAPKGEKTDWVMHEYRLDGKFSFHTLPKTAKNEWVICRVFQKSSGVKRTHISGMMMLDSYGNEMVYSSSALPPLTDSSPSIGNNTKALSVTDSAYVPCFSNPIDVPRGIFDSLNNINISINSNTLYGVSSNHSFYNTQGVQLQAPPTLPLPSSSNHYLRAFLENQGNGSNMSNNGFEPEREMVSVSQKTSLSTDVKAEISSLGKRHFENQNNPIASAAAVAPMDLATLWNY

SEQ ID NO: 32153 - protein, 214 aa, Glycine max
  Clone ID: TF_GmC119269_1.pep
MAPVLPPGFRFHPTDEELVAYYLKRKINGRKIELEIIPEVDLYKCEPWDLPGKSLLPGKDLEWYFFSPRDRKYPNGSRTNRATKSGYWKATGKDRKVNSQARAVGMKKTLVYYRGRAPHGSRTNWVMHEYRLDERECETNSGLQDAYALCRVVKKTAVIPPKVGGHYVNVPNANKITSDQSSSIELYSEGRHEDLDSSNYLMSMDICSPCNMGN

SEQ ID NO: 32154 - protein, 357 aa, Glycine max
  Clone ID: TF_GmC500_1.pep
MENVSVLLCNKEKDQMDLPPGFRFHPTDEELISHYLYRKVTDTNFSARAIGEVDLNRSEPWDLPWKAKMGEKEWYFFCVRDRKYPTGLRTNRATESGYWKATGKDKEIFRGKSLVGMKKTLVFYKGRAPKGEKTDWVMHEYRLDGKFSFHNLPKTAKNEWVICRVFQKSSGVKRTHISGMMMLDSYGNEMVYSSSALPPLTDSSPSIGNNTKALSVTDSAYVPCFSNPIDVPRGIFDSLNNINISINSNTLYGVSSNHSFYNTQGVQLQAPPTLPLPSSSNHYLRAFLENQGNGSNMSNNGFEPEREMVSVSQKTSLSTDVKAEISSLGKRHFENQNNPIASAAAVAPMDLATLWNY

SEQ ID NO: 32155 - protein, 62 aa, Glycine max
  Clone ID: TF_uC-gmflpic081d07b1.pep
MGVPERDPLAQLSLPPGFRFYPTDEELLVQYLCRKVAGHHFSLPIIAEVDLYKFDPWVLPGN

SEQ ID NO: 32156 - protein, 419 aa, Glycine max
  unsure (1)..(419): unsure at all Xaa locations
  Clone ID: TF_GmC44609_1.pep
MAKPKMPGFRFQPTDVELIEYFLKRKVRGKKFPSEMIAELDLYXFAPLDLPDMSLLKNGDLNXDFVCPRGKKYSTGGXIGVMHEFRLDDKVLADEGXCRVYQKEGPGPRNGAQYGKPYEEKEWETDEEIDSVQSAPVAAVCAPVPIQPSESHISVANYIHPSTSGCAGLTSVSCVSELMPSCSTHPSAPSNPVGTVSCVSELIPSCSEPHHLPSNNQVGSVSCVSEFMPSCSAHPLAPNNQVDSVPCVSEFMPSCSAHPSAPNSQVGSVSGLIPSFLAHSSASNNQVGSVPCVPELVPSCLAHPSAPNNQADVGILPFLDCSIEDDDTLAVNENNSIENVDDPDQANNAERGPCSDPNAIFEELGDLNSLVGLGEGSFSCGQKNEYTTSEMLYTVDIFGSCDHDFLELIDLETPHALAE

SEQ ID NO: 32157 - protein, 195 aa, Glycine max
  Clone ID: TF_GmC518857_1.pep
MVPRVRPCVRFPMAGPSWLVDKSRIATKIKSASGTCGKVIWKSNPSRACPSCHHVIDNSDVAQEWPGLPIGVKFDPSDQEIIWHLLAKVGAGNSKPHPFIDEFITTLEVDDGICYTHPQHLPGVKQDGSSSHFFHRVINAYNTDSRKRRTICGQDLGDVRCHKTGRTKPVILNAIQKGCKKIMALYISPVRGRKS

SEQ ID NO: 32158 - protein, 220 aa, Glycine max
  Clone ID: TF_GmC1902_1.pep
MGRFENHVVKGGIKLPIGFRFCPTDEELLLHYLKKKAFAQQLPASVISEFDVFQTEPWKLPGELRENRYFFSNRSNGNIKRPAGSGCWKSVGKEKQIIHSESNQVIGMKETLFFCKGSHETRTQWVMHELRLVASYPCQMPVADFAVYRIFQKNKMKTRRSHGKKPSSSSKLQRLVDVKASFFDFTVDFNHDDIGPPTPFFPTAASFVFSWLLLSLDFSH

SEQ ID NO: 32159 - protein, 226 aa, Glycine max
  Clone ID: TF_GmC407_1.pep
FDPTDQEILEHLEAKVRSDIHKLHPLIDEFIPTLEGENGICCTHPEKLPGVSKDGLIRHFFHRPSKAYTTGTRKRRKVHTDADGSETRWHKTGKTRPVFISGKLKGYKKILVLYTNYRKQRKPEKTNWVMHQYHLGNNEEEKEGELVVSKVFYQTQPRQCGSLMKDSYPAKLKGEGVHEVTNHKNTGYVEYYNNSFVSFDQGDQHRSSTAQLVSHFPVHGGATFIP

SEQ ID NO: 32160 - protein, 221 aa, Glycine max
  unsure (1)..(221): unsure at all Xaa locations
  Clone ID: TF_GmC195_1.pep
MASELQLPPGFRFHPTDQELVLHYLCRKCASQPIAVPIIAEIDLYKYDPWDLPGLASYGEKEWYFFSPRDRKYPNGSSAEPGGGNRDLWKATGADKPIGHPKPVGIKKALVFYAGKAPKGDKSNWIMHEYRLXADVDRSVRKKXHPKGLDDWXLLCRIYNKKGTIEKHGSNRRSTLYSRNMRSSASEPNGRVGEKPRVSFNSCMPPNTRTASRRSSRAIIR

SEQ ID NO: 32161 - protein, 305 aa, Glycine max
  Clone ID: TF_GmC7703_2.pep
MGAVVECYPPPRTAVLSLNTLPLGFRFRPTDEELIDYYLRSKINGNSDDVWVIREIDVCKWEPWDLPDLSVVRNKDPEWFFFCPQDRKYPNGHRLNRATNHGYWKATGKDRKIKSGSTLIGMKKTLVFYTGRAPKGKRTNWVMHEYRPTLKELEGTNPGQNPYVLCRLFKKQDESLEASNGDDVERTASTPTTANYCPDEIQSDSALVPASSSQVTEDDKPLPVISENSEEAISNIITPGDIHSDECDASDAQYQIVEPIAKEDQLPNVDIFYDPTNQQLDDKLFSPVHAHFPADFYYQANNQSE

SEQ ID NO: 32162 - protein, 172 aa, Glycine max
  Clone ID: TF_GmC195_4.pep
MASELELPPGFRFHPTDEELVLHYLCRKCASQPIAVPIIAEIDLYKYDPWDLPGLATYGEKEWYFFSPRDRKYPNGSRPNRAAGTGYWKATGADKPIGQPKPVGIKKALVFYAGKAPKGDKSNWIMHEYRLADVDRSVRKKNTLRLDDWVLCRIYNKKGTIEKLQPSKRCCS

SEQ ID NO: 32163 - protein, 156 aa, Glycine max
  Clone ID: TF_GmC14820_2.pep
MENRTSSVLPPGFRFHPTDEELIVYYLCNQASSRPCPASIIPEVDIYKFDPWELPDKTDFGEKEWYFFSPRERKYPNGVRPNRATVSGYWKATGTDKAIYSGSKHVGVKKALVFYKGKPPKGLKTDWIMHEYRLIGSRRQANRQVGSMRVSLCLTC

SEQ ID NO: 32164 - protein, 337 aa, Glycine max
  Clone ID: TF_GmC473_1.pep
MGVPERDPLAQLSLPPGFRFYPTDEELLVQYLCRKVAGHHFSLPIIAEVDLYKFDPWVLPGKAVFGEKEWYFFSPRDRKYPNGSRPNRVAGSGYWKATGTDKIITTEGRKVGIKKALVFYIGKAPKGSKTNWIMHEYRLLDSSRKHNLGTAKLDDWVLCRIYKKNSSSQKVEANFLAMECSNGSSPSSSSHVDDMLGSLPEINDRCFTLPRVNSLRTMHQQDEKFGSPNMGSGFFSDWVNSTDLDSISEFESGCQTQRMVNYDCNDFFVPSLPPLGHVDYMVDAPLEEEVQSGVRTRRVDGPGHFQPNPDTRLLPGSGDPFGFGFIMGQQVGFGVRE

SEQ ID NO: 32165 - protein, 375 aa, Glycine max
  Clone ID: TF_GmC499_1.pep
MGSTDSSSGSQQPNLPPGFRFHPTDEELVVHYLKKKTASAPLPVAIIAEVDLYKFDPWELPAKAAFGEQEWYFFTPRDRKYPNGARPNRAATSGYWKATGTDKPVLTSGGTQKVGVKKALVFYGGKPPRGIKTNWIMHEYRLTDNKPNNRPPPGCDLGNKKNTLRLDDWVLCRIYKKSNTHRSPMEHDREDSMDDMIGGIPPSINVGHMSARFHHLSKMTTAYNNGALLENDHHNLLEGMMIGNSNGGMNTTTTTTPGPMSSHLGGSKEELSFVPTMTHSSNTSKRTLSSLYWNDEDVAGTSSSNKRFNLELSGDNNNHGSVVRDDQENGTASSIATLLNQLPQTPSLHQQSILGSIGDGLLRTTYQIPGMNWYA

SEQ ID NO: 32166 - protein, 150 aa, Glycine max
  unsure (1)..(150): unsure at all Xaa locations
  Clone ID: TF_GmC424_7.pep
MGVPEKDPLSQLSLPPGFRFYPTDEELLVQYLCRKVAGHHFSLPIIAEIDLYKFDPWVLPIKRFSXEKEWYFFSPRDRKYPNGSRPNRVAGSGYWKATGTDKIITTEGRKVGIKKALVFYXGQCPKGTNTIWTMHEYRLPSLPKEPWPQT

SEQ ID NO: 32167 - protein, 154 aa, Glycine max
  unsure (1)..(154): unsure at all Xaa locations
  Clone ID: TF_GmC79805_1.pep
MEGSTTSSELPPGFRFHPTDEELIVYYLCNQATSKPCPASIIPEVDLYKFDPWELPDXTEFGENEWYFFSPRDRKYPNGVRPNRATVSGYWKATGTDKAIYSGSKHVGVKKSLVFYKGRPPKGAKTDWIMHEYRLAESKIPSSRKIGSMRHQYW

SEQ ID NO: 32168 - protein, 259 aa, Glycine max
  Clone ID: TF_GmC54821_1.pep
MARMGPGFRFHPTDEELVVFYLKRKMTGNLSRYDHIAVVDVYKLEPWDLPPLSKLKTKDLEWYFFSALDRKYGNGSRTNRATDRGYWKTTGKDRPVTHGDRTVGMKKTLVYHSGRAPQGRRTNWVMHEYKMLDDELARSGTVLDVFVVCRIFEKSGSGPKNGAKYGAPLDEKEWDVEDGTRMKRMSRRRWLPCSFLIMRWLLLLPCRRLLIMWWLILLCWRRLLIIIIWWLLLLLPCRLLLMGPMFQPTTLTWNLIGVV

SEQ ID NO: 32169 - protein, 295 aa, Glycine max
  Clone ID: TF_GmC625_21.pep
MKGELELPPGFRFHPTDEELVNHYLCRKCAGQPIAVPIIKEVDLYKFDPWQLPEIGYYGEKEWYFFSPRDRKYPNGSRPNRAAGSGYWKATGADKAIGKPKALGIKKALVFYAGKAPKGVKTNWIMHEYRLANVDRSASKKNNNNLRLDDWVLCRIYNKKGKIEKYNTTAPKMNLEMIHSFEHENETKPEIHKLGNEQLLYTETSDSVPRLHTDSSSSEHVVSPDVRCEREVQSDPKWNNDDYDLGLQLENAFDFQFNYLDDNNLSVDDDPFGTVQYQMGQLSPLQDMFMYLQKM

SEQ ID NO: 32170 - protein, 291 aa, Glycine max
  Clone ID: TF_GmC625_20.pep
MKGELELPPGFRFHPTDEELVNHYLCRKCAGQPIAVPVIKEVDLYKFDPWQLPEIGFYGEKEWYFFSPRDRKYPNGSRPNRAAGSGYWKATGADKPIGKPKALGIKKALVFYAGKAPKGVKTNWIMHEYRLANVDRSASKKKNNNLRLDDWVLCRIYNKKGKIEKYNTGAAKMNVEMVHSFEHENETKPEIHKLGNEQLYMETSDSVPRLNTDSSSSEHVVSPDVTCEREVQSDPKWNDDLDLKLENAFDFQFNYLDDNNLSVDDYLFGTVQYQMGQLSPLQDMFMYLQKM

SEQ ID NO: 32171 - protein, 123 aa, Glycine max
  Clone ID: TF_GmC705867_1.pep
RVRAPQGIRTDWVMHEYRLDDKECEDTTGLQDTYALCRVFKKNGICSDIEEQGQCNISLIESSQTIINECETMSPDIPGASSSCLEEEDKDDSWMQFITEDAWYSSNAAMVGSEEVSHVTFTN

SEQ ID NO: 32172 - protein, 216 aa, Glycine max
  Clone ID: TF_GmC2540_9.pep
MEVLNPIEGKTYKLPVGYRFDPSDEILAGYYLRKRIMAQPSPNDLIQDCDVYQTVPWELPGGGSKNLNWQRFFFHDLRTRVFENLNKREAGNGQWRTIEKAQDFELSKEQVVARKNVLAFWEAKGNGFAKSNWVMHEFRLVSKSHPSMVSAMAVYRIFKTKKEGRKGKKAKRSEGETSSSSSSEEEAMDETPIVIDFTMENGTVTGPPSPATSEAS

SEQ ID NO: 32173 - protein, 296 aa, Glycine max
  Clone ID: TF_GmC5673_1.pep
MGLRDIGASLPPGFRFYPSDEELVCHYLYKKIANEEVLKGTLVEIDLACAIILMHAEVAKLNANEWYFFSFRDRKYATGFRTNRATTSGYWKATGKDRKVEDPATQEVVGMRKTLVFYRNRAPNGIKTGWIMHEFRLETPHMPPKEDWVLCRVFHKSKEDDNSSKLLQYETTPSSLTLLASSSPTNQAMPHGVGYNNRLATSFSNSFMPTHQYHHHFNPTQNANSLMDLLHFSRETNTNNTGFLTQIGAKGDDEYGFLWDMDLEENSLDDGVASNLDAIRFEVDNNNTNNNNMVLL

SEQ ID NO: 32174 - protein, 65 aa, Glycine max
  Clone ID: TF_LIB5119-023-A1-PF1-B5.pep
MEENLPPGFRFHPTDEELITCYLTRKVYDSSFTSKAIAVVDLNKCEPWDLPGSLRALSSTLFLLL

SEQ ID NO: 32175 - protein, 220 aa, Glycine max
  unsure (1)..(220): unsure at all Xaa locations
  Clone ID: TF_LIB4392-037-R1-K1-F9.pep
MESMESCVPPGFRFHPTDEELVGYYLRKKVFFXKIDLDVIREIDLYRIEPWDLQERCRIGYEEQNEWYFFSHKDKKYPTGTRTNRATMAGFWKATGRDKAVYERAKLIGMRKTLVFYKGRAPNGQKSDWIMHEYRLESDENGPPQEEGWVVCRAFKKKTTGQTKTINIEGWESSYFYDEASGATSTLVDPIELISRQSQSFLAHNFMCKQELEADNLTCM

SEQ ID NO: 32176 - protein, 358 aa, Glycine max
  Clone ID: TF_GmC1208_1.pep
MQAMENIHQREILEEQRFELPPGFRFHPTDEELITHYLSQKVLDSCFCARAIGEADLNKCEPWDLPWMAKMGEKEWYFFCVRDRKYPTGQRTNRATGVGYWKATGKDREIYKAKALIGMKKTLVFYKGRAPSGEKTSWVMHEYRLEDEHSVHNPPKKAMNDWAICRIFQKSNGGKKMPISGLVRFSNFAKDMPSLMDSSPYNDSESKPVLGESSQPTCFSDPNQSEDQRTQDENIADSYETLMLASSYSSNPSDISPASWTFSKSAPTVSHQSLQVGNSHSSDYFMLHQEQSMLGMLIENHGASAGQRTQKAQDSKGSDADMSSVMYNNYEMFQRSFGNQEYSSPSVGHVYSSGLWGF

SEQ ID NO: 32177 - protein, 60 aa, Glycine max
  Clone ID: TF_LIB3242-501-P1-J1-E5.pep
AGSADCFSQMMSSMPGFCFHPTDEELVMYYLKRKICGKRLKLDVIHETDVYKWDPEDLPG

SEQ ID NO: 32178 - protein, 120 aa, Glycine max
  Clone ID: TF_uC-gmropic088h01b1.pep
NGRNLKPGGNSSSDAILLRYISLPSYRFHPTDEELVLHYLCRKCASQPIAVPIIAEIDLYKYDPWDLPGLATYGEKEWYFFSPRDRKYPNGSRPNRAAGTGYWKATRADSPLVKPTGWDK

SEQ ID NO: 32179 - protein, 242 aa, Glycine max
  Clone ID: TF_701123582_FLI.pep
DLPPGFRFYPTEEELVFFYLHNQLEGQIHDTSRVIPVIDINGVEPWNLPSLAGELCRGDTEQWFFFSPRQEREARGGRPNRTTASGYWKATGSPGHVYSSDNKVIGMKKTMVFYKGKAPTGRKTKWKMHEYKAIEHSDQSNTAPPKLRHEFSLCRVYVISGSFRSFDRRPLDMPRVELRVVDGDRGAASTSAQAQQRSSSHTSHSGGDAHVTDAGAGSSGTNWNASNRVEEPLWEWEQLDWP

SEQ ID NO: 32180 - protein, 304 aa, Glycine max
  Clone ID: TF_GmC5683_1.pep
MNVKVHSSDDTKKDEEVVLPGFRFHPTDEELVGFYLQRKVDKKPLKIELIKQVDIYKYDPWDLPKVNSFGDKEWYFFCIRGRKYRNSVRPNRVTRSGFWKATGIDKSIYCVKEPHECIGLKKSLVYYRGSAGKGTKTDWMMHEFRLPPNAKSSPNDVQEAEVWTLCRIFKRIPSFKKYAPNLKDSTPATKPNPVNSNASTLDSDNCCKPYLICRDPMMMQQIERKPVIGQVDEKKHLFLGQFGPLSHLQAPSTTPYPNFWNQNNVEDHAFANENWDDLRSVVQFAIDPSTVFDCTETYIPPYFS

SEQ ID NO: 32181 - protein, 364 aa, Glycine max
  Clone ID: TF_GmC389_1.pep
MGSIENASKPRKENPKFELPAGFRFHPTDEELINQYLTKKVVDNCFCAIAIGEVDLNKCEPWDLPGLAKMGETEWYFFCVRDRKFPTGIRTNRATDIGYWKATGKDKEIIMENALIGMKKTLVFYKGRAPKGEKTNWVMHEYRLEGKHNQPPPAKSEWVICRVFEKSRCGKKMHVPKCGRFNNPFGEEPSSGASLLPPLMDSSPYNSETRTTTAGELSQVTCFSDPNQTEDQNNTHDDIVDSMETPILNFSPFSRPDDASTLAKATLSSASNQSAQIAHQIGDSQFPDYCYAPQEPSMLRMLMENHEPCAKQTQKEEFPEGRDFDGDISSMIYSSDMINRMFGNQEHSSSASAGPVDTDFLWNY

SEQ ID NO: 32182 - protein, 65 aa, Glycine max
  Clone ID: TF_LIB3242-161-Q1-J1-A7.pep
LAAHYLLTTINSLRNDLHVIVEMDLYKTYPCDIHDTSELCYDLKNEWYFFIHKDTICATRTRTNK

SEQ ID NO: 32183 - protein, 108 aa, Glycine max
  unsure (1)..(108): unsure at all Xaa locations
  Clone ID: TF_LIB3092-046-Q1-K1-D7.pep
TPPGFRFYLTDXELVNHYLRRKCADQPISVPIIKXVDLYKIYSWHLPQIDYYCXKEWYFFSSRDQKYSNGSRPXNRAILSGYWXKLTRADKPXGNTKALGIQXALVFY

SEQ ID NO: 32184 - protein, 279 aa, Glycine max
  Clone ID: TF_GmC388_1.pep
MEDHAHAALPPGYRFYPSEEVLVGYYLTKKNENREEGFYGSDLIRELDLYDHDPFELPDAAACFSYGYKGRKKHWFCYAKETKRRNRRKVKSGFWLRKGKVRDISDHNGDDVVLGTRTRFVFYVGNSLKNAARTDWILYEYALVDRFLASFVLCRVVNKPPHKNSPSEIGLSCCAEESVVAVVRHVGVQCDGCAESDVVEAKVCDEGFVNRENEIAENPISGEHGDPAAPVSVAQGSHQVQERLSKLPSGSALFVGAMTSQQLMLSILEEDFIELDDIA

SEQ ID NO: 32185 - protein, 201 aa, Glycine max
  Clone ID: TF_GmC572_1.pep
MEDGSVNLPPGFFFSPTDEELVLHFLYCKASLIPCHPNIIPDLHPSQLAPWELNGKALLSGNQYYFFTKVNENRARENGYWKDTGVTEPILSTFDKKVGMKKYLVFHIGEAPQGTETSWVMQEYYICSSGFDTASYRSARRRRKHDQSWSKWVLCKVYEKIRSQQGVNCYSDDDDSGSELSWLDEVYLSLDDDLEEIGMPI

SEQ ID NO: 32186 - protein, 137 aa, Glycine max
  unsure (1)..(137): unsure at all Xaa locations
  Clone ID: TF_GmC473_3.pep
MGVPERDPLAQLSLPPGFRFYPTDEELLVQYLCRKVAGHHFSLPIIAEVDLYKFDPWVLPGKAAFGEKEWYFFSPRDRKYPNGSRPNRVAGSGYWKATGTXQIITTEGRKVGIKKALVFYVGKAPKGSKTHWIMHEY

SEQ ID NO: 32187 - protein, 136 aa, Glycine max
  unsure (1)..(136): unsure at all Xaa locations
  Clone ID: TF_GmC195_5.pep
MASELELPPGFRFHPTDEELVLHYLCRKCASQPIAVPIIAEIDLYKYDPWDLPGLATYGEKEWYFFSPRDRKYPNGSRPNRAAGTGYWKATGADKPIGQPKPVGIKKALVFYAGKAPKGDKXSNWIMHEYRLADVD

SEQ ID NO: 32188 - protein, 365 aa, Glycine max
  Clone ID: TF_GmC160_1.pep
MESTEDSSTSSQQQPNLPPGFRFHPTDEELVVHYLKKKVDSVPLPVSIIADVDLYKFDPWELPAMASFGAEEWYFFSPRERKYPNGARPNRAATSGYWKATGTDKPICSGTQKVGVKKSLVFYGGKPPKGVKTDWIMHEYRVTENKPNNRPPGCDLGHKKNSLRLDDWVLCRIYKKGNTQRSHERDDSMDDMIGEVPPSINVGHMSARFHLSKMSTSYSGALLENDRNTLEGVVIGNGSVNGISNTNNITSVISSSHQFGTSNSKAELLPFVPSNNTSNSASKRTLSSLYWNVDDDNDDDDHKHFNLDSNGNVSVLRTEENNNNTNGTSGSFATLLNQLPQTPSLPQIDGLLRTPYQIQGTNWYG

SEQ ID NO: 32189 - protein, 123 aa, Glycine max
  unsure (1)..(123): unsure at all Xaa locations
  Clone ID: TF_jC-gmfl02220079g06a1.pep
MDDDIVGLGFRPTEEELVDFYLKHMLLGNDPRAHVIPVIDLCDVEPWDVPXPVDFKYSRSKRFNRTTKCGFWKATGKDRDIRTGDTNTVIGTKKTLVYYQSRVSCGVKSNWVIHEYHAVTFHE

SEQ ID NO: 32190 - protein, 193 aa, Glycine max
  Clone ID: TF_GmC434_3.pep
MDDIVGYGFRPTDEELVKFYLKHKLLDDDPCVHFILDVDLCEVEPWDLPLLLADSAVRFNGREWFFFSPVDYKYSNSKRVNRTTKCGFWKPTGKDRGIRSKDTNNVIGTKKTLVYYQGRVSSGVKSNWVIHEYHAVTFHESQRTFVLCRLMKKPGKTTEGGTDALICDEGGPSRSMVSDYENQATTQGIPSVS

SEQ ID NO: 32191 - protein, 189 aa, Glycine max
  Clone ID: TF_GmC36703_1.pep
MGDNNVNLPPGFRFYPTDEELVVHFLQRKANLLPCHPDVIPDLELYPYDPWELHGRALAEGKQWYYYSRRTQNRVTSNGYWMPMGMEEPVISNSSNKRVGMKKYYVFHLGEAPDGNTTNWIMQEYRLLDSASSSISSRRRSQPKPDHNKWVICRVYEQDNDDDGDGTELSCLDEVFLSLDDLEEISLPN

SEQ ID NO: 32192 - protein, 332 aa, Glycine max
  Clone ID: TF_GmC560_1.pep
MESCVPPGFRFHPTEDELVGYYLKRKINSLKIDLDVIVEIDLYKMEPWDIQDRCKLGYEQQNEWYFFSHKDKKYPTGTRTNRATAAGFWKATGRDKAVMSKNRIIGMRKTLVFYKGRAPNGRKTDWIMHEYRHQTSEHGPPQEEGWVVCRAFRKPSPSHRPGFDHPWCSTSSQQQHFFRDQIQSYSSRPLSIADILDETNNVPHPNAEGTSFSHPFSSDHQQHLNNLLSNQTVAIMDKQLIELPQLDSPTASLAIKECNQQQHNGLTNEEYCSDERSNNSNAQGIDWKSLDNLFGSQLSDNAAYFSHPNLPLMMPHNHDQASHILGCFPDSS

SEQ ID NO: 32193 - protein, 340 aa, Glycine max
  Clone ID: TF_GmC473_2.pep
MGVPERDPLAQLSLPPGFRFYPTDEELLVQYLCRKVAGHHFSLPIIAEVDLYKFDPWVLPGKAAFGEKEWYFFSPRDRKYPNGSRPNRVAGSGYWKATGTDKIITTEGRKVGIKKALVFYVGKAPKGSKTNWIMHEYRLLDSSRKHNLGTAKLDDWVLCRIYKKNSSAQKVEANLLAMECSNGSSPSSSSHVDDMLESLPEIDDRCFTLPRVNSVRTMQQQDEKFGFQNMGSGFFTDWVNPTDLDSVSEFGSGCQTQGMVNYDCNDLFVPSVPPFGHSHVNYMVGAPPSEEEVQSGVRTQQADGAACFQQNPNARLLPGSGDPFGFGFIMGQQVEFGFRD

SEQ ID NO: 32194 - protein, 314 aa, Glycine max
  unsure (1)..(314): unsure at all Xaa locations
  Clone ID: TF_701130443_FLI.pep
MDDDIVGLGFRPTEQELVNFYLKHKLLGDDPRVHVIPVIDLCDVEPWNVPXPVDFKYLKSKRFNRTTKCGFWKATGKDRDIRTGDTDNTVIGTKKTLVYYQGRVSCGVKSNWVIHEYHAVTFHENQRTFVLCCLMKKPGKTTEGGTDPLICDEGEPSRSMISDYENQPTAEGIASEGTFTGIEAIFQATPWAENCFSPIQQSLTLIEQEGASFPNYAFNNAYFRNEDNIMQTPFETTKEDEFLNLILADESIVINEENKHDFVNSSTQSESLKRVYCESSDTDAEVISKLVKIYQVQIILGRVSPFVSEVALDL

SEQ ID NO: 32195 - protein, 302 aa, Glycine max
  Clone ID: TF_GmC1823_1.pep
MINMATMEDMSNMSGEITLPGFRFHPTEEELLDFYLKNMVVGKKLRYDVIGFLNIYQHDPWDLPGLAKVGEREWYFFVPRDKKHGSGGRPNRTTEKGFWKATGSDRKIVTLSDPKRIIGLRKTLVFYQGRAPRGCKTDWVMNEYRLPDNCKLPKEIVLCKIYRKATSLKVLEQRAALEEEREKKQMVDNSPASPPSSTDTMSFSSPQEEQNVPLPLLQHVLKKESETTEDMVVSKQEKTTNQLTLKDTKSTCGTSLQMPFGKEKLPDLQLPMLSDWTQDTFWAQLNSPWLQNFTPTNILNFY

SEQ ID NO: 32196 - protein, 205 aa, Glycine max
  Clone ID: TF_GmC1823_2.pep
MATMEDMNNMSGEITLPGFRFHPTEEELLDFYLKNMVVGKKLRYDVIGFLNIYQHDPWDLPGLAKVGEREWYFFVPRDKKHGSGGRPNRTTEKGFWKATGSDRKIVTLSDPKRIIGLRKTLVFYQGRAPRGCKTDWVMNEYRLPDNCKLPKEIVLCKIYRKATSLKGLEQRAALEEEREMKMVGSPASFTDTMFSSPQEEQTCPC

SEQ ID NO: 32197 - protein, 324 aa, Glycine max
  Clone ID: TF_GmC1395_1.pep
MEENLPPGFRFHPTDEELITCYLTRKVSDSSFTSKAIAVVDLNKCEPWDLPGKASMGKKEWYFFSLRDRKYPTGLRTNRATESGYWKTTGKDKEIFRAGVLVGMKKTLVFYRGRAPRGEKSNWVMHEYRLENKHHFGPSKDEWVVCRVFQKSLQVKRPQQTPSSQPESPCDTASMVNEFGDVELPNLINNIANSSGGLTNNISGQTCFNADLINSVNTNMNLAMNWPVASEVIQVPTLPSLPWPSGLLNPSISVNSLLLKALQLRSYQQREAATDHLIASYVPQGVSHVGTDLSSNLTASSSKVLECMPQQQQLEQPFNLDSIW

SEQ ID NO: 32198 - protein, 174 aa, Glycine max
  unsure (1)..(174): unsure at all Xaa locations
  Clone ID: TF_uC-gmflLIB3275P064b07b1.pep
MGVPEKDPLSQLSLPPGFRFYPTDEELLVQYLCRKVAGHHFSLPIIAEIDLYKFDPWVLPNLIDXFAGKAIFGEKEWYFFSPRDRKYPNGSRPNRVAGSGYWKATGTDKIITTEGRKVGIKKALVFYVGKAPKGTKTNWIMHEYRLLDSSRKNTGTKLDDWVLCRIYKKNSSAQ

SEQ ID NO: 32199 - protein, 108 aa, Glycine max
  Clone ID: TF_LIB3242-526-P1-J1-E10.pep
LLLCYCTGLATYGEKEWYFFSPRDRKYPNGSRPNRAAGTGYWKATGADKPIGQPKPVGIKKALVFYAGKAPKGDKSNWIMHEYRLADVDRSVRKKNTLRLDDWVLCRI

SEQ ID NO: 32200 - protein, 294 aa, Glycine max
  Clone ID: TF_GmC250956_1.pep
VLAQIKKKRVMLAMEELLCELSDHEKRNEQGLPPGFRFHPTDEELITFYLASKVFNDTFSNLKFAEVDLNRCEPWELPDVAKMGEREWYLFSLRDRKYPTGLRTNRATGAGYWKATGKDKEVYSASSGTLLGMKKTLVFYKGRAPRGEKTKWVMPEYRLDAHFSLPHTYPSKEEWVICRIFHKSGEKRTPVLQVQGHSDAFFVPNKKFFTSITCKLISFSAARLPKPGSDSPTRPKWPLSPSSFPIGNLQRQKPPIGPTLQAPPAKLHPEDQGTNYYSKSDQNGGRYILSSITR

SEQ ID NO: 32201 - protein, 302 aa, Glycine max
  Clone ID: TF_GmC169_1.pep
MSNISMVEAKLPPGFRFHPRDEELVCDYLMKKVQHNDSLLLIDVDLNKCEPWDIPETACVGGKEWYFYTQRDRKYATGLRTNRATASGYWKATGKDRPILRKGTHVGMRKTLVFYQGRAPKGRKTEWVMHEFRIEGPHGPPKISSSKEDWVLCRVFYKNREVSAKPRMGSCYEDTGSSTLPALMDSYISFDQTQTHADEFEQVPCFSIFSQNQTSPIFNHMTTMEPKFPLNHATTTYGGAPNLGYCLDPLSCDRKMLKAVLNQITKMERNPLNQSLKGSPSLGEGSSESYLSEVGMPHVWNY

SEQ ID NO: 32202 - protein, 93 aa, Glycine max
  Clone ID: TF_jC-gmfl02220085a06a1.pep
LANLLIRHILGSPKCNMSLGFRFHPTDEELILHYLIEEVAFIPLSDTIIGEDDIYNVDPWDLPPKATFGEKERYLFRPRDRQYPDGARINRAF

SEQ ID NO: 32203 - protein, 279 aa, Glycine max
  Clone ID: TF_GmC14820_1.pep
MENRTSSVLPPGFRFHPTDEELIVYYLCNQATSRPCPASIIPEVDIYKFDPWELPEKTDFGEKEWYFFSPRERKYPNGVRPNRATVSGYWKATGTDKAIYSGSKHVGVKKALVFYKGKPPKGLKTDWIMHEYRLIGSRRQANRQVGSMRLDDWVLCRIYKKKNIGKSMEAKEEYPIAQINLTPANNDSEQEMVKFPRTSSLTHLLEMDYLGPISHILSDATYNSTFDFQINTANGGIDPFVKPQPVEIPYAADSGKYQVKQNSTINPTIFVNQVYYQRG

SEQ ID NO: 32204 - protein, 213 aa, Glycine max
  unsure (1)..(213): unsure at all Xaa locations
  Clone ID: TF_GmC195_3.pep
FLIFIYLLLCYFTGLATYGEKEWYFFSPRDRKYPNGSRPNRAAGTGYWKATGADKPIGQPKPVGIKKALVFYAGKAPKGDKSNWIMHEYRLADVDRSVRKKNTLRLDDWVLCRIYNKKGTIEKLQPSSDLRPVGFNPEAAHGLXSCSEQVVSPEFASEVQSEPKWNEWEKSLEFPFNYVDATLNNSFMAQFQGNNQMLSPLQDMFMYWPNKSF

SEQ ID NO: 32205 - protein, 270 aa, Glycine max
  Clone ID: TF_GmC1826_1.pep
RTNRATQAGYWKATGKDRPVHSQKKQVGMKKTLVYYRGRAPHGIRTNWVMHEYRLIESVPGTALSSLKDSYSLCRIFKKTIQIPAKPNNNEEEQPEIANKKESMWISEEQMLGEDSSGTEISREMENVDEKILNHEHPKFPCDASSSDLTQGACTPTDTGIAEDFQPQFACDEANSAANSYTMGIGYSTNIFQDVEMPSYADMHYQLPYTPLVMEDFPQINLPETKTTKPEVTDDCMLYDRYRDCMNGTLEEIISLCCTQDNSVPFPMLE

SEQ ID NO: 32206 - protein, 398 aa, Glycine max
  Clone ID: TF_GmC434_2.pep
MDDIVGYGFRPTDEELVKFYLKHKLLDDDPCVHFILDVDLCEVEPWDLPLLLADSAVRFNDPEWFFFSPVDYKYSNSKRFNRTTKCGFWKPTGKDRGIRTGDTDNTVIGTKKTLVYYQGRVSCGVKSNWVIHEYHAVTFHENQRTFVLCCLMKKPGKTTEGGTDPLICDEGEPSRSMVSDYENQPTAEGIASEGTFTGIEAIFQATPWAENCFSPIQQSPTLIEQEGASFPNYAFNNAYFRNEDNIMQTPFETTKEDEFLNLILADESIVINEENKHDFVNSSTQSESLKRVYCESSDTDAEVISKLDDNIVDISTACNDYPNSDEYYSSKRFKSSHDAVHGGICFLPSNLEANQEKNESMFQDSFWGAETSSCDSTLDKPLEINYIDISSSPFTPWR

SEQ ID NO: 32207 - protein, 152 aa, Glycine max
  unsure (1)..(152): unsure at all Xaa locations
  Clone ID: TF_GmC627_1.pep
EVQVVHNFVGINTLMYYSLTIVQFAGIASNSTGLALSLITSGLNALGTILSMVFIDRYGRRRLILVSMVGIIVFLVVXVLYFYLAVQNAPWNSNHDTLAFGRNSTCEAYPTALILSSWNFMQCLQEDCAFYANSDNQVYNKLTSSNLLLSFP

SEQ ID NO: 32208 - protein, 181 aa, Glycine max
  Clone ID: TF_GmC217080_1.pep
MMEERNNNDAAEKLDEVMLPGFRFHPTDEELVGFYLKRKIQQRPLTIELIKQLDIYKFDPWDLPKLATTGEKEWYFYCPRDRKYRNSARPNRVTGAGFWKATGTDRPIYSSEGSKCIGLKKSLVFYKGRAAKGVKTDWMMHEFRLPSLTDSLSPKYIDQITIPANESWAICRIFKKPMLQL

SEQ ID NO: 32209 - protein, 349 aa, Glycine max
  Clone ID: TF_GmC415_1.pep
MEGDQHGSNYSFPPGFRFHPSDEELIVHYLENKVSSRPLPACIIAEIDLYKYNPWELPNKSLFGEEEWYFFSPRDRKYPNGLRPNRAAASGYWKATGTDKPILSSCGSRRIGVKKALVFYSGRPPKGAKTDWIMNEYRLVDTTIKSSRLKGSMRLDDWVLCRVRYKGYSQKNSCENQESPSELNLSAKLLRSEENPTKMNCRADMIPDYQYKDYQIIASILVGGPIPPIESMPNLSFKGCKGNNVVSDYEDGFTKGNSQTTIPSLESYFNPLTRKSNEDEQYGNLISFNRKFNTDNRMDGSTSKVLNSRELNCYNQNHSQDDIFNGNPPDPTINFQELNELDFSGRYHQ

SEQ ID NO: 32210 - protein, 359 aa, Glycine max
  Clone ID: TF_GmC1307_1.pep
MGSSTNGGVPPGFRFHPTDEELLHYYLKKKVSFQKFDMDVIREVDLNKMEPWDLQERCRIGSTPQNEWYFFSHKDRKYPTGSRTNRATNAGFWKATGRDKCIRNSFKKIGMRKTLVFYKGRAPHGQKTDWIMHEYRLEDGNDPQGSANEDGWVVCRVFKKKNLFKIENEGGSTHKPDHQINNSSNTNARSYRENHYLLHQQQNPRNSSGLELDKPELALHYPPPHLQNPPYSLFQSQPLLQTQKPMVYDYSYTSDTPIMAKQLMTNPRDCESGSDGLRYQVSESGMEVGSCEPNQEMGTGRGEGINEWGVLDRLVTSHLAGNEDSSKGVRFEEANPQSVHQINQLSLRGEMDFWAYGKQ

SEQ ID NO: 32211 - protein, 223 aa, Glycine max
  Clone ID: TF_GmC424_4.pep
MGVPEKDPLSQLSLPPGFRFYPTDEELLVQYLCRKVAGHHFSLPIIAEIDLYKFDPWVLPSKAIFGEKEWYFFSPRDRKYPNGSRPNRVAGSGYWKATGTDKIITTEGRKVGIKKALVFYVGKAPKGTKTNWIMHEYRLLDSSRKNTGTKLDDWVLCRIYKKNSSAQKTAHNGVVPSNEHTQYSNGSSSSSSSQLGDVLESLPSIDERCFAMPRVNTLQHSTT

SEQ ID NO: 32212 - protein, 364 aa, Glycine max
  Clone ID: TF_GmC363_1.pep
MDTFSHVPPGFRFHPTDEELVGYYLRKKVASKRIDLDVIKDVDLYKIEPWDLQELCKIGTDEQSDWYFFSHKDKKYPTGTRTNRATKAGFWKATGRDKAIYSKHCLIGMRKTLVFYKGRAPNGQKSDWIMHEYRLETNENGTSQEEGWVVCRVFKKRMTTTQKVGEYDQSPCWYDEQVSFMQDLESPRRNISQTYASYHHHQQQHHHHPCKPELMELQYNNIPHDAFLQLPQLESPKVTQSSCSVVPYGYESNNNNNGSTLQFSSLTQEEQLQYCNNQQSHHSLYGSNDHAVDQVTDWRVLDKFVASQLSHNNQDVSKETSYSNAPIFHVAEQISVAANGSKKEQVSQEYASTSTSSYQIDLWK

SEQ ID NO: 32213 - protein, 220 aa, Glycine max
  Clone ID: TF_GmC111_1.pep
KIYETLINIPGRITGVRKDGQIRHFFHRPSKAYTTGTRKRRKVHTDKEGSETRWHKTGKTRPVFVGGAVKGFKKILVLYTNYGRQQKPEKTNWVMHQYHLGTSEEEKDGELVVSKIFYQTQPRQCGNNSIIKQDLYDEERLMSNQISVHNDDDNNIIPRSNNASALMDYYNPSFINYDQLGGRSNRESSAQLIPNLAMQGDSSSFIRLAMDATKAMLDRK

SEQ ID NO: 32214 - protein, 161 aa, Glycine max
  Clone ID: TF_GmC806574_1.pep
MGDNNVNLPPGFRFYPTDEELVVHFLHRKASLLPCHPDVIPDLEVYPYDPWELDGRALAEGNQWYYYSRRTQNRVTGNGYWKPTGIEEPVVSSTSNKRVGMKKYFVFHVGEAPAAGIKTNWIMQEYRLSDSSSSTRSSKRKSQPKIVSIHIFIHNQEAHQT

SEQ ID NO: 32215 - protein, 223 aa, Glycine max
  Clone ID: TF_GmC56379_1.pep
MEEDYPPGFRFFPTEEELVGFYLHNKLEGQRNAIAIAIDRVIPVIDINGVEPWNLPTLAGELCRGDTEQWFFFSPGQERETRGGRPSRTTACGYWKATGSPCYVYSSHNKVIGVKKSMVFYKGKAPMGTKTKWKMNEYRAIHVPSQSTPATLHLTCEFSLCRVYVISGSFRAFDRRPLEKEGAESRVHRIENILGGARAHQTCPHSQMLEAGESSSTKWDVNN

SEQ ID NO: 32216 - protein, 233 aa, Glycine max
  Clone ID: TF_GmC130308_1.pep
MAIAAANSSPTMSLSHSQSQEDATTASTTNKPVDVDDNDDHEHDMVMPGFRFHPTEEELVEFYLRRKVEGKRFNVELITFLDLYRYDPWELPALAAIGEKEWYFYVPRDRKYRNGDRPNRVTTSGYWKATGADRMIRTENFRSIGLKKTLVFYSGKAPKGIRTSWIMNEYRLPQHETERYQKAEISLCRVYKRAGVEDHPSLPRCLPTRPSSSRASHDNNKKHNEMVQHNINM

SEQ ID NO: 32217 - protein, 340 aa, Glycine max
  Clone ID: TF_GmC1131_1.pep
MEGTRAKEGTLPPGFRFHPTDEELVTCYLVNKISDSNFTGRAITDVDLNKCEPWELPGKAKMGEKEWYFFSLRDRKYPTGVRTNRATNTGYWKTTGKDKEIFNSETSELIGMKKTLVFYKGRAPRGEKSNWVMHEYRIHSKSSYRTNRQDEWVVCRVFKKSGGAKKYHSSNHARTVNPYSLEIGPSIMPPPMMQLGDPSAHFLYGRNYMNSAELAELARVLRGGGSTSSVNLPIQSQLSYPTSSSAGGGGFIISGLNLNLGGGATATTQPILRPMQPSPPVHTMAQVLDVNSSMMTTSSLGAENNVGYGTEVSNNMNSHGNRYMGMDHHCMDLDNYWPSY

SEQ ID NO: 32218 - protein, 36 aa, Glycine max
  unsure (1)..(36): unsure at all Xaa locations
  Clone ID: TF_LIB3242-679-P1-J1-C10-F1A.pep
IFVKNGELILPPVFRFHPTDEELFLXYLKRKVSYCP

SEQ ID NO: 32219 - protein, 363 aa, Glycine max
  Clone ID: TF_GmC1474_1.pep
MGTPQSNNLPPGFRFHPTDEELILHYLRKKVASIPLPVAIIAEVDIYKFDPWELPAKAAFGEKEWYFFSPRDRKYPNGARPNRAAASGYWKATGTDKNIVASLAGGVREHFGVKKALVFYKGKPPKGVKTNWIMHEYRLVDTNRPIRIKDTSMRLDDWVLCRIYKKFKHAVSPTTEAASTLQVINEQLDQAVVEEEEQIKDTLLPILKNNNTFVPPPQATILMSQKSLSFSNLLDATDYSMLSTILSENHSNNYPTPSETSLFNNCENLDQEITPQNYYINDTNSINNNSYLFQKNPSNMENIARPKRHLPNMDHEDNMLLYPLKKYHSSSCNFPNTNLQNQNPQWNFMFKQPLMSPQYLQFQ

SEQ ID NO: 32220 - protein, 54 aa, Glycine max
  Clone ID: TF_LIB3051-059-Q1-K2-D5.pep
IESMARMGPGFRFHPTDEELVVFYLKRKMTGNLSRYDHIAVVDVYKLEPWDLPR

SEQ ID NO: 32221 - protein, 254 aa, Glycine max
  Clone ID: TF_GmC6673_1.pep
MENMPPGYRFYPTEEELISFYLHNKLEGEREDMNRVIPVVDIYDYNPSELPQISGEASMRDTEQWFFFIPRQESEARGGRPKRLTTTGYWKATGSPNHVYSSDNRIIGIKRTMVFYSGRAPNGTKTDWKMNEYTAIKTSSSSPTLRKEFNLCRVYKKSKCLTAFDRRPPPRRDTESYSGAQNVEEQQKGSTSYDDYHHKMVERSATCSPAESSSSGDHDQPPLHGEEATQMDVDNNDDPFLDWEKVDMFLGSEP

SEQ ID NO: 32222 - protein, 125 aa, Glycine max
  Clone ID: TF_7685641.pep
LVDFYLKRKIQQKSLPIELIKQVDIYKYDPWDLPKLAGTGEKEWYFYCPRDRKYRNSARPNRVTRAGFWKATGTDRPIYSSEGKCIGLKKSLVFYRGRAAKGMKTDWMMHEFRLPCISDSCPAKK

SEQ ID NO: 32223 - protein, 50 aa, Glycine max
  unsure (1)..(50): unsure at all Xaa locations
  Clone ID: TF_uC-gmrominsoy158g10b1.pep
LYLPPGFRFHPTDEEPLXSTYLRCKCASEHICXAITVEIDLFMYHPWDLP

SEQ ID NO: 32224 - protein, 95 aa, Glycine max
  unsure (1)..(95): unsure at all Xaa locations
  Clone ID: TF_jC-gmle01810075f03a1.pep
EFVSRRDPLAHLSFPPGFRFYPTGDDLLVQYLCRNVFGPHFSLSIIAEIDFYKFVPSPLPFKAAFGGKECYFXRPRFRIYPFVLRPNSQRDFCFL

SEQ ID NO: 32225 - protein, 41 aa, Glycine max
  Clone ID: TF_11412668.pep
FHPTDHNLVLHYLCRLCASQSIDVPLITEIYLYIYYTWNLP

SEQ ID NO: 32226 - protein, 35 aa, Glycine max
  Clone ID: TF_LIB3093-046-Q1-K1-A1.pep
SYLSPDFRFHPTDYELILHYLSKKVSSIPLLYSII

SEQ ID NO: 32227 - protein, 61 aa, Glycine max
  Clone ID: TF_uC-gmflminsoy078f11b1.pep
MGTPQSNNLPPGFRFHPTDEELILHYLRKKVASIPLPVSIIAEVDIYKFDPWELPGLSTFK

SEQ ID NO: 32228 - protein, 103 aa, Glycine max
  Clone ID: TF_jC-gmro02910073d08a1.pep
MGEASGAGSADCFSQMMSSMPGFRFHPTDEELVMYYLKRKICGKRLKLDVIHETDVYKWDPEDLPVQSILKTGDRQWFFFCHRDRKYPNGGRSNRATRRGYWK

SEQ ID NO: 32229 - protein, 279 aa, Glycine max
  unsure (1)..(279): unsure at all Xaa locations
  Clone ID: TF_GmC165789_1.pep
MPENMSISVNGQSQVPPGFRFHPTEEELLQYYLRKKVSYEKIDLDVIRDVDLNKLEPWDIQEKCKIGTTPQNDWYFFSHKDKKYPTGTRTNRATAAGFWKATGRDKVIYSNGKRIGMRKTLVFYKGRAPHGQKSDWIMHEYRLDDNNTADTNIVSNVMGDAAQEEGWVVCRIFKKKNHLKTLDSPLASGEGRRSHLFDSCDEGALEQILQQMGRGCKEESSYEGNYNSYGRFAMGLNNGGGGGYNDRFMKLPSLESPKSASMENHHNTNNXCNNNMKSN

SEQ ID NO: 32230 - protein, 438 aa, Glycine max
  unsure (1)..(438): unsure at all Xaa locations
  Clone ID: TF_GmC206_3.pep
ARGNSRSVGVXKTLVFYAGRAPSGERTDWVMHEYTLDEEELKRCLGVKDYYALYKVYKKSGPGPKNGEQYGAPFNEEQWADDDIVDFNINSADQEAPNDVDNGNVLQPLLDDEIDNIIRGILDDELVLDQQHVNGYPDFPQVVSEETQSTVVDQFSEAVMFPEPVRITQPSNQFFDAQPSFDFNRPVTSHLHVSETSEVTSASNIKTKELDFNEDGFLEINDLIDTEPTLSNVENSVEYQHFEDGLSELDLFQDAQMFLRDLGPIIHETDSHAYTNALVSSNIECQSYQLLPNPEDANQTVGEFWMHGESNQLSSPGVVYESVGFPTEGNNNQSSTVEDVATSSLSSALWAFVESIPTTPASAAESALVNRALNRMSSFSRLKIKHTNIAASGKDTGTMKRAGRKGLPFLFFSILIALCAFCWVFVGNLRLVGRSISP

SEQ ID NO: 32231 - protein, 113 aa, Glycine max
  Clone ID: TF_GmC625_11.pep
MPGELQLPPGFRFHPTDDELVNHYLCRKCAAQTIAVPIIKEIDLYKFDPWQLPEMALYGEKEWYFFSPRDRKYPNGSRPNRAAGSGYWKATGADKPIGKPKALLEAGSQDSRL

SEQ ID NO: 32232 - protein, 363 aa, Glycine max
  Clone ID: TF_GmC1311_1.pep
MYSMDSSSSGSQFSQHPQLPPGFRFHPTDEELVVQYLKKKADSVPLPVSIIAEVDLYKFDPWELPSKATFGDQEWYFFSPRDRKYPNGTRPNRAATSGYWKATGTDKPILASHGHHNKVGVKKSLVFYGGKPPKGVKTNWIMHEYRLADSSSNSSSKPPSSASDHAHSGKKNSLRLDDWVLCRIYKKSNSTHLPRLPLMEQNKEISREISMLPMMSTLSMANDNNTPQDSKTASSRSTSYGPLGVENDDNFFDGIFGVDHQSMQQDVSDHSQQVSSKGNFPMKRELSSQFWNGTGSSSSSRRFHYDLNYAGNSTTVEEDNSFVSLLSHLPQNTTTFHPNALLGPVGNGVLRQQFQLPSMNWNT

SEQ ID NO: 32233 - protein, 103 aa, Glycine max
  unsure (1)..(103): unsure at all Xaa locations
  Clone ID: TF_LIB4127-116-Q6-J1-E9.pep
MPPPRTPPTSPPTSMYNDDHEHDMVMPCFRLHPIEEELEXLPLTLRVQGXRLNDELIIFLNLYRYDPWEHSALAAXISEKEWHLYVPIDRKYLNCDRPIRVTT

SEQ ID NO: 32234 - protein, 154 aa, Glycine max
  Clone ID: TF_GmC434_1.pep
MDDDIVGLGFRPTEQELVNFYLKHKLLGDDPRVHVIPVIDLCDVEPWNVPASSSAIRFGDPDWFFFSPVDFKYLKSKRFNRTTKCGFWKATGKDRDIRTRDTDNTVIGTKKTLVYYQGRVSCGVKSNWVIHEYHAVTFHENQVRFFYSINFNTA

SEQ ID NO: 32235 - protein, 313 aa, Glycine max
  unsure (1)..(313): unsure at all Xaa locations
  Clone ID: TF_GmC1127_1.pep
MQDGSASHFFHRAINDYNTGTRKRRKILGQDFGDVRWHKTGRTKPVVFNGIQKGCKKIMVLYVSNVRGGRAEKTNWVMHQYHLGTNEDVXEGEYIISIIFYKXAVXVKLGDKYDEDVPEASEINVLTIVKVDPVTPKFVTPETPCNERWCADLDLGQETHNSPQLPQMDCLDEIQADYQDLANESSMVETQHNEGMDDKEKNTEEGQKWWDSESQNLLDSQQLVEALSLCDDLLQSQSPSRDGKHEDHKNQPGLSVYAQLGPENLKKDIEECQNLALDKANIENDTPSEFRLSQLEFGSQDSFISWGYGKAVN

SEQ ID NO: 32236 - protein, 69 aa, Glycine max
  Clone ID: TF_6454111.pep
DKRGGFPRPVGINKALVFYAGKAPNGEKSNWIMHECGLADVDLFRRKKNSYRLYYWVLYRFYILKCAID

SEQ ID NO: 32237 - protein, 169 aa, Glycine max
  Clone ID: TF_GmC94853_1.pep
YDPWDLPGNCDLQERHFFSPKEAKYRNGNRMNRTTKCGYWKATGSDKRISSSTCNNGIVGVRKTLIFYEGKSPKGSRTHWVLHEYRLVSVETGAANSSHNNYVNEIGDWVLCRLSMKKRSLESDGSATHQKHRQNNTVQTSRPRLMFDFMMVGKTNSSTSSSCSSSSNI

SEQ ID NO: 32238 - protein, 323 aa, Glycine max
  unsure (1)..(323): unsure at all Xaa locations
  Clone ID: TF_GmC398_1.pep
MAKAVGVRFHPTGVELVVYFLKRKVMAKKICDGFIAELDIYKYAPWGLPDKSCLRTGELEWDIFXHLERNMNYGFSXFCALKFGNSSSASDCVYVFLFFNXVSRIKTLIFHTGKSPRGERTDWVMHEHRLEDKDLADKGIAQDSYVVCKVFQKEGLGPGKGTHYARPFNEEEWDDEEIGIPCAALTAQVPTLPITSDGSVANDNHLPASGCIGSASTSCLSGSVPSLGTVNPTGPNDQAVNDDILPMLHIFNDDKWFEEIYNPGQENIVEGAPPSDDFFAGLEDYFAGFSSGQNTGDVGNSDDLDFLELNDLDTPLFYPTTQP

SEQ ID NO: 32239 - protein, 320 aa, Glycine max
  unsure (1)..(320): unsure at all Xaa locations
  Clone ID: TF_GmC424_1.pep
MGVPEKDPLSQLSLPPGFRFYPTDEELLVQYLCRKVAGHHFSLPIIAEIDLYKFDPWVLPSKAIFGEKEWYFFSPRDRKYPNGSRPNRVAXGSGYWKATGTDKIINQLRIMHXIETSPPSRKNTGTKLDDWVLCRIYKKNSSAQKTAQNGVVPSNEHTQYSNGSSSSSSSQLEDVLESLPSIDERCFAMPRVNTLQQQQHHEEKVNVQNLGAGGLMDWTNPSVLNSVADFVSGNNQVVQDQTQGMVNYNCNDLYVPTLCHLGTSVPLKMEEEVQSGVRNQRVGNNNSWFLQNDFTQGFQNSVDTSGFKYPVQPVGFGFRN

SEQ ID NO: 32240 - protein, 99 aa, Glycine max
  Clone ID: TF_LIB3242-682-P1-J1-F9.pep
PHECIFHSTDGELVLRFLCCKCASQHIVDTIIVVLDLYRYDHWDLPGLGLYGEKEWHFFTRRDRTYLNGLRANRSRGTGYWKATGADKPVGNRDRADQE

SEQ ID NO: 32241 - protein, 289 aa, Glycine max
  Clone ID: TF_GmC432_1.pep
KQWKLVQTSGKSLFLLFSLSFSRTKLNLVYKILSLLKLMDRGLDDQKDMREKHVREREKERQGERQALCRGRAPERGRARLLERQRGSLRNREPTRDCSYDNNRIYRRSRERGRDRDRRHEEYLPRCRSISRNSSRIGSSTRQKGGNQEHNRQDAEPDQEVWTKVIRRREAKAAKKNYTQNRSLHNLSANHPNWRDKEDITSFYFTNFTDNVNEVRLWGKFKIWGDVREVFIAKRRNKEGRRFGFVRFKDVSDVKLLETHLDNIFIDDHKLFVNLPRFTRLASNVHTHT

SEQ ID NO: 32242 - protein, 229 aa, Glycine max
  Clone ID: TF_GmC525_4.pep
MEKVSFVKNGELRLPPGFRFHPTDEELVLQYLKRKVFSCPLPASIIPEVDVCKSDPWDLPGDLEQERYFFSTKEAKYPNGNRSNRATNSGYWKATGLDKQIVTSKGNQVVGMKKTLVFYRGKPPHGSRTDWIMHEYRLNILNASQSHVPMENWVLCRIFLKKRSGAKNGEESNKVRNSKVVFYDFLAQNKTDSSSSAASGITHEHESDEHDHEESSSSNTFPYTIRTKP

SEQ ID NO: 32243 - protein, 362 aa, Glycine max
  Clone ID: TF_GmC83_1.pep
LLIRQIMGNPESNLPPGFRFHPTDEELILHYLNKKGKKVASIPLPVSIIAEVDIYKLDPWDLPAKATFGEKEWYFFSPRDRKYPNGARPNRAAASGYWKATGTDKTIVTSLQGGAQESVGVKNALVLYKGRRPKGVKTNWIMHEYRLVDNNKPIKLKDSSMRLDDWVLCRIYKKSKHALTSTEASIGVGEVDQAEEHLFQETLLPISKSPAPPPQNTLISQKSVSFSNLLDAMDYSILSSFLSENHTNHPPWVGSSAGFNTGNLDQQCSPINNNNPTNNYMFQKNPQLNPSVSNMENMMRPKRQVSNMDEETLYPSKKYLSSSCNFPTNISNQYENPQWNYLMKQSLMNQRLMLGPHLQFQG

SEQ ID NO: 32244 - protein, 120 aa, Glycine max
  Clone ID: TF_LIB3056-003-Q1-N1-G7.pep
MERLNFIKNGVSRLPPGFRFQPTDEELVFQYLKCKIFSCQLPASIIPEINVSKNDPWDLPGNCDEQERYFFSSKEAKYRNGNRMNRTTNSGYWKATGSDKKISSSISNIGFAGLRKTLIF

SEQ ID NO: 32245 - protein, 321 aa, Glycine max
  unsure (1)..(321): unsure at all Xaa locations
  Clone ID: TF_GmC207_2.pep
MTWCNDSDEDRVIESMTPTITITPNTDGIKLTEEIRTITCPSCGHNIDFVKYXGGIHDLPGLPAGVKFDPNDQEILEHLEAKVASDACKLHPLIDEFIPTLEGENGICYTHPEKLPGVSKDGQIRHFFHRPSKAYTTGTRKRRKVHTDDEGSETRWHKTGKTRAVFAAGGAVKGFKKILVLYTNYGRQKKPEKTYWVMHQYHLGNTEEEKDGELVVSKVFYQTQPRQCVNPIIIKDPYEKMLNGGSVQDSTNTSITKTTATLLDCYNAPYIDYDHAHASHNRESSSQLIIPSSVVQVDGSYIRSTMDAKKARFESNTGKSF

SEQ ID NO: 32246 - protein, 278 aa, Glycine max
  unsure (1)..(278): unsure at all Xaa locations
  Clone ID: TF_GmC423_1.pep
MATTTQLHLPPGFRFHPTDEELVIHYLCRKCASQHIAVPIIAEIDLYKYDPWDLPGMALYGEKEWYFFTPRDRKYPNGSRPNRSAGTGYWKATGADKPVGKPKPVGIKKALVFYAGKAPKGEKTNWIMHEYRLADVDRSVRKKNSLRLDDWVLCRIYNKKGAIEKQQLPPPSGVRKIECYEMEDEKPEILPPDXTAATVADCLYFEASDSVPRLHTTDSSCSEQVVSAEFASEVQSEPKRGSNNNNEFAYNYVDATLGNNQMSPLQDIFMYLSKSFCN

SEQ ID NO: 32247 - protein, 416 aa, Glycine max
  Clone ID: TF_GmC74085_1.pep
SINYLMMEEPVVVNKGDYDHDHDQPLDLPPGFRFHPTDEEIITCYLTEKVLNRAFSATAIGEADFNKCEPWDLPKKAKMGEKDWYFFSTWDRMIPTGMRTNRATQSGYSQTLSTSLWSVPRKNNLVGMKKTLVFYRGRAPKGEKTNWVMHEFRLDGKFACYNLPKAAKDEWVVCKVFHKSSTTTTDVNKRVLPIINPGLLRMNSSNGEDLLFDFSSLPPLVDPLFDQTSNKHIDNDFKGTNNTPSSSSAKLPSSSGYYLPNFNNNNNNQQMLMMKPEEHKIYEIPINNYASTSQVDFTTTNNPMGISTSNNNILLSQPQIRTQNSTSVPFNMFQDCYNHTHQGKQCKMEQFSIDSTKKQPVVSASQDTCLSNDTSSVVSKQDNNMGRNKALYEDNFEGPSSVATTLSDLECLWDDY

SEQ ID NO: 32248 - protein, 123 aa, Glycine max
  Clone ID: TF_GmC44609_2.pep
MAKPKMPGYRFQPTDVELIEYFLKRKVRGKKFPSEIIAEVDLYKFAPWDLPAMSLLKNGDLSWYFFCPRGKKYSTGGRLNRATEAGYWKTTGKDRAIEHNNRVVGMIKTLVFHTGRAPKGDRT

SEQ ID NO: 32249 - protein, 244 aa, Glycine max
  Clone ID: TF_GmC206_4.pep
MGEASGAGSADCFSQMMSSMPGFRFHPTDEELVMYYLKRKICGKRLKLDVIRETDVYKWDPEDLPGQSILKTGDRQWFFFCHRDRKYPNGGRSNRATRRGYWKATGKDRNVICNSRSVGVKKTLVFYAGRAPSGERTDWVMHEYTLDEEELKRCQGVKDYYALYKVYKKSGPGPKNGEQYGAPFNEEEWADDDIVDFNINSADQEAPNDVADNVNVPLPFLDDEIRMSIREILDDELHIHCCNR

SEQ ID NO: 32250 - protein, 144 aa, Glycine max
  unsure (1)..(144): unsure at all Xaa locations
  Clone ID: TF_GmC499_2.pep
MESTDSSSGSQQPNLPPGFRFHPTDEELVVHYLKKKAASAPLPVAIIAEVDLYKFDPWELPAKAAFGEQEWYFFTPRDRKYPNGARPNRAATSGYWKATGTDKPVLTSGGTHKVGVXKALVFYGGKPPRGIKTNWIMHEYRLTD

SEQ ID NO: 32251 - protein, 58 aa, Glycine max
  Clone ID: TF_701070486H1.pep
QRGKFPGLELLDVNDGDLFVPGEFSSNFPLKLEHHQSFVGGLNRNPGPMRAIDSIQER

SEQ ID NO: 32252 - protein, 224 aa, Glycine max
  Clone ID: TF_GmC525_2.pep
MEKVNFVKNGELRLPPGFRFHPTDEELVLQYLKRKVFSCPLPASIIPELHVCKSDPWDLPGDLEQERYFFSTKVAKYPNGNRSNRATNSGYWKATGLDKQIVTSKGNNQVVGMKKTLVFYRGKPPNGSRTDWIMHEYRLILNASQSQSHVVPMENWVLCRIFLKRRIGAKNGEESNSKVVFYDFLAQNKTDSSSSVASGITHESDEHEESSSSNTFPYTIRRKP

SEQ ID NO: 32253 - protein, 326 aa, Glycine max
  Clone ID: TF_GmC5702_1.pep
MMPGNGQLTVPPGFRFHPTDEELLYYYLRKKVSYEVIDLDVIREVDLNKLEPGDLKDKCRIGSGPQNEWYFFSHKDKKYPTGTRTNRATTAGFWKATGRDKSIYHTNSKRIGMRKTLVFYTGRAPHGQKTDWIMHEYRLDEDDADVQEDGWVVCRVFKKKNQSRGFQQELEEEEHLTTHMRASGPCQVLEQKHLHMQGGPYDHYNFDGTMHLPQLFSPESAIAPPTNSSLALSMNAMDILECSQNLLRLTTTGCGLNLMQQQQEERFSGDWSFLDKLLASHHGMDQSKCNPPTNHHAATAVGTSAQKFPFHYLGCDTTHDIMKFSK

SEQ ID NO: 32254 - protein, 104 aa, Glycine max
  Clone ID: TF_LIB3242-060-Q1-J1-E1.pep
MVQKEKEAIIKEGTTEIEMEGTRAKEGTLPPGFRFHPTDEELVTCYLVNKISDSNFTGRAITDVDLNKCEPWELPGKAKMGEKEWYFFSLRDRKYPTGVRTNRA

SEQ ID NO: 32255 - protein, 313 aa, Glycine max
  Clone ID: TF_GmC5682_1.pep
MGVNEDFNKDIDDHHHEYVDDDDVPLPGFRFHPTDEELVSFYLRRKLHKKPISIELIKQIDIYKYDPWDLPKTSATAEEKEGYFFCRRGRKYRNSIRPNRVTGSGFWKATGIDKPVYSHGGEGNDCIGLKKTLVYYRGSAGKGIKTDWMMHEFRLPSNKDNTTNLPSSKNYVDVPQEAEIWTLCRIFKRNVSQRKHTPDLKQLSAKRHSIHDKNSRMSNVEFNNTNQESYINFGGHYQNEQKPVINYTNSDQRNQYHVMTHQLFAAPVAQHHQQPQQLTSPSSNFWLNSPPGNDFFTFDNWDELGSVVKFVVD

SEQ ID NO: 32256 - protein, 358 aa, Glycine max
  Clone ID: TF_GmC648_2.pep
MTNDNIAVTDLTSALNEENRADLVNALKSKIQSLAGAHSDVLETLSPNVRKRVESLREIQGKHDEIEADFLKEKEALEAKYQKLYQPLYTKRYEIVNGVIEVEGAANETTDESEEDKEKGVPSFWLNAMKNNDVLAEEISERDEGALKFLKDIKWSRIENPKGFKLDFFFDTNPYFSNTILTKTYHMIDEDEPILEKAIGTEIEWYPGKCLTQKVLKKKPKKGSKNAKPITKTESCESFFNFFKPPEVPEDDADIDEDLAEELQNQMEQDYDIGSTLRDKIIPHAVSWFTGEAAQGDEFEDLEDDEDEEEDEDEDEDEEDDEDEDDEEEDDTKTKKKKSGKAQAGDGDGERPPECKQQ

SEQ ID NO: 32257 - protein, 366 aa, Glycine max
  unsure (1)..(366): unsure at all Xaa locations
  Clone ID: TF_GmC532_1.pep
MSDLGSDLPAAAAALSAEDRAGLVNALKDKLQLLAGQHVDILETLPPKVRQRVEILRDLQSQHDEVEAKFLEERSKLEAKYQKLYEPLYTKRYEIVNGVVEVEGVTNVAVPEEANKAAEDKGVPEFWLTAMKTNETLVEEITELEEGSLKYLKDIKRYINDXSLGHHSRFLGXKLDYFKNSELTKTYHMIEDDDPILEKAIGTEIEWHPGKCLTQKILKKKPSKGSKNAKPITKTEKCESFFNFFNPPQVPEDDDDIDDDAVEELENLMEHDYDIGSTIRDKIIPHAVSWFTGEAAQSDFEDIDEDDYEDEEGDDDDDEDEDEDEDEEDEEEKKGKSKSKSKLQSGGRAIPGKDQPMERPPECKQQ

SEQ ID NO: 32258 - protein, 191 aa, Glycine max
  Clone ID: TF_GmC648_6.pep
MSNDKDTFNVADLTSALNEDNRADLVNALKSKIQSLAGQHSDILESLSPNVRKRVEVLREIQGQHDELEAKFFEERAALEAKYQKLYQPLYTKRYEIVNGTTEVEEGAVKETAPDNEEDQEKGVPAFWLTAMKNNEVLAEEISERDEGALKYLKDIKWSRIENPKGFKLDFFFDTNPYFTNSVLTKTYHMI

SEQ ID NO: 32259 - protein, 66 aa, Glycine max
  Clone ID: TF_GmC532_3.pep
CWACTINNFILNMPNYISSSTIICSLVLHLYLVSFREQIIKKKKPFPTRDHQIINTLSFNINEKYY

SEQ ID NO: 32260 - protein, 147 aa, Glycine max
  unsure (1)..(147): unsure at all Xaa locations
  Clone ID: TF_uC-gmroLIB3259P244c01b1.pep
LPGRLGGEPIFEKAIGTGIQWPPRKSLAPKILXKNPKRGWRMVNPLPKLEIGEASFIFFTPPQVLXDDENIHXNVAGGLPNQMGPDYFIWSPIRDKNISPAVSWVTGEATPGDEFWDLEDDEDDEDIEKDDDXDEEDDDHYYDYHYY

SEQ ID NO: 32261 - protein, 145 aa, Glycine max
  Clone ID: TF_LIB4203-002-R1-K1-H7.pep
MSAPTAKASKKELNSNHDGADETSEKEQQEAIEHIDEVQNEIDRLNEQASEEILKVEQKYNKLRQPFFQKRSELIAKIPNFWVTTFVNHPQVSALLGEEDEEALHYLTRVEVTEFGDIKSGYRIDFYFDENPYFENKVLFKEFHL

SEQ ID NO: 32262 - protein, 147 aa, Glycine max
  Clone ID: TF_GmC532_2.pep
NCNYFCAILVPEKDQTRADSARGESFFNFFNPPEVPEDDDDIDEDAVEELQNLMERDYDIGSTIRDKIIPHAVSWFTGEAAQSDFEDIDEVDYDDEEGDEDEDEDEDEEEEEEEEEEKKGKSRSKSGGRVKPGKDQPTERPPECKQQ

SEQ ID NO: 32263 - protein, 135 aa, Glycine max
  unsure (1)..(135): unsure at all Xaa locations
  Clone ID: TF_GmC648_5.pep
NLPKTESCESFFNFFKPPXEVPEDEARVDEDLAEELQNQMEQDYDIGSTIRDKIIPHAVSWFTGEAVEGDEFEDLEDDEDGDDDEDDEEEDEDEDDDDGDEEEEDSKTKKKSSAVKKSGRAQAGDGERPPECKQQ

SEQ ID NO: 32264 - protein, 55 aa, Glycine max
  Clone ID: TF_700899387H1.pep
GIILSRIVDTTCHNSRSIKFWSSSTASSAISSSSSWTSGGVKKLKKLSPRAESAR

SEQ ID NO: 32265 - protein, 262 aa, Glycine max
  Clone ID: TF_GmC648_4.pep
MTNNNDNIAVTDLTSALNEENRADLVNALKSKIQSLAGAHSDVLETLSPNVRKRVESLREIQGKHDEIEADFLKEKEALEAKYQKLYQPLYTKRYEIVNGVIEVEGAANETTDESEEDKEKGVPSFWLNAMKNNDVLAEEISERDEGALKFLKDIKWSRIENPKGFKLEFFFDTNPYFSNTILTKTYHMIDEDEPILEKAIGTEIEWYPGKCLTQKVLKKKPKKGSKNAKPITKTESCESFFNFFKPPEVPEDDVDIDEDLV

SEQ ID NO: 32266 - protein, 258 aa, Glycine max
  Clone ID: TF_GmC602_2.pep
MVGDNTKKLKVAENLEDSIDGELVLSIEKLQEVQDELDKINEEASDKVLEVEQKYNEIRKPVYDKRNDVVKSIPDFWFTAFMSHPALCELLNVEDQKIFKYLGSLDVEDNKDVKSGYSITFNFNPNPYFENTKLTKTFTFLEEGTTKITATPIKWKEGKGLPNGLDHDKNGNKRARIDISFFSWFSDCEQKDDVDEIHDEVAELIKDDLWPNPLTYFNNELDEEDVDSEADDEENDEDDSEDDDQEENDAGSEDGNHS

SEQ ID NO: 32267 - protein, 370 aa, Glycine max
  Clone ID: TF_GmC648_1.pep
MSNDKDTFNVADLTSALNEDNRADLVNALKSKIQSLAGQHSDILESLSPNVRKRVEVLREIQGQHDELEAKFFEERAALEAKYQKLYQPLYTKRYEIVNGATEVEEGAVKETTPDGEEDQEKGVPAFWLTAMKNNEVLAEEISERDEGALKYLKDIKWSRIENPKGFKLEFFFDTNPYFINSVLTKTYHMIDEDEPILEKAIGTEIQWHPGKCLTQKILKKKPKKGSKNAKPITKTENCESFFNFFNPPQVPEDDEDIDEDAAEELQNQMEQDYDIGSTIRDKIIPHAVSWFTGEAIQGDEFGDLEDDEDDEDIEEDDDEEEEEDEDDDDDEDDEEESKTKKKSSAPKKSGRAQLGDGQQGERPPECKQQ

SEQ ID NO: 32268 - protein, 264 aa, Glycine max
  unsure (1)..(264): unsure at all Xaa locations
  Clone ID: TF_GmC602_1.pep
MVADRSKKPKVSEKGENLDEIDGELVLSIEKLQEIQDELEKINEEASDKVLEIEQKYNEIRKPVYDKRNDIIKAIPDFWLTAFLSHPALGDLLNEEDQKIFKYLSSLEVEDFKDVKSGYSITFNFNANPYFEDTKLVKTYTFLEEGTTKVXATPIKWKEGKGIPNGVNHEKKRDKRGXTDVSFFSWFSDTEQKDDIDDIHDEXVAELIKDDLWPNPLTYFNNEEPDEEEGDEDEADDEGKEDESDDDDDNQEEDDDEGEEDDYK

SEQ ID NO: 32269 - protein, 346 aa, Glycine max
  Clone ID: TF_GmC648_3.pep
MFNCEQSKIQSLAGQHSDILESLSPNVRKRVEVLREIQGQHDELEAKFFEERAALEAKYQKLYQPLYTKRYEIVNGTTEVEEGAVKETAPDNEEDQEKGVPAFWLTAMKNNEVLAEEISERDEGALKYLKDIKWSRIENPKGFKLDFFFDTNPYFTNSVLTKTYHMIDEDEPILEKAIGTEIQWHPGKCLTQKILKKKPKKGSKNAKPITKTENCESFFNFFNPPQVPEDDEDIDEDVAEELQNQMEQDYDIGSTIRDKIIPHAVSWFTGEAIQGDEFGDLEDDEDDEDIEEDDDEDEEDDDDDDDDDDDEEESKTKKKSSAPKKSGRAQLGDGQQGERPPECKQQ

SEQ ID NO: 32270 - protein, 143 aa, Glycine max
  unsure (1)..(143): unsure at all Xaa locations
  Clone ID: TF_LIB4127-038-Q1-K1-G3.pep
LPPCRRVLVFKIFSPLTLQGQHDELEAKFFEERAALEAKYQKLYQPLYTKRYEIVNGTTEVEEGAVKETAPDNEEDQEKGVPAFWLTAMKNNEVLAEEISXRDEGALKYLKDIKWSRIENPKGFRLDFFFDTNPYFTKXCLDK

SEQ ID NO: 32271 - protein, 128 aa, Glycine max
  Clone ID: TF_GmC259_3.pep
DPKQQKRIRKRSFVAGFATLSVGFRLQGKSIAAATTSASFASWNRPNFPPKVYHPHGNMATGPADSYTETKCGVCHAGTDEHLLLLCDLCDTASHTYCVGLGYTVSDGDRFCHDCAISRETNINEESD

SEQ ID NO: 32272 - protein, 76 aa, Glycine max
  Clone ID: TF_GmC126_6.pep
MPYNPDDLMVQCEGCKDWDYKMYHPACMGMTIEEAKKLDHFVCSECSSDDDMKKPQATFSASLGADGKVEPKRRKR

SEQ ID NO: 32273 - protein, 701 aa, Glycine max
  unsure (1)..(701): unsure at all Xaa locations
  Clone ID: TF_GmC1741_1.pep
MVVSGGKGLKRAAKKRVTADFYDFLTFPTPSLAEAENFAGGPFRSNVRAFLTKHALLPPPSALFPHLLTWQIVFRVGELTEGPDAPVVCLDVVEEDVARSRSVYCDQCRVFGEMTRPFFLRFIACFDLPCYFCVNKVSPKWSETRLILDQCNAIDPDXYILVYSLFLSSDNTTHLLHGVVHTNGYGHLEPNRLEEGGSRFLSGIHIMDFWDRLCKTLGVRKVSVMDVSKKYGIEYRLLHAIMKGHPWYGDWGYKFGSGSYCLTHESYKSAVESLSNLPLSTFSQGKMPDSRVQDMIKYYQSLSEHELVNIRDLFCFIMGLIGDAHKTASNVDETTCKKRCFNASGLSISWDKSGIERVEQAMIIVLCAVSESKWVSWRALMGAASKLGSSELLDYCLGELGGKMVYGGMVVNSYGCVKTTEGEFRLEAATGACYGILAKNNSLGSKYPSEENLLQCLRYLYDSLLHPQMMVNYEAGTRTLAMNSAQKLFDCKQFVKDYNPEMWPLSDSQMFRLSCHVELVDEFEDSEAITPPELVVLPLNATVAELKNQAANAFQDVYLRFRRLQVDGLHGYSGVDDSTQVKLLLGSRDVVCVRGRCIGKNGLSKFRMERGLERWTVDCSCGAKDDDGERMLACDICGVWRHTRCSDIHDTDPVPARFVCLKCQNCESKLKCSGHCKDETVTNVSGSSCFRNGLPVPSDVI

SEQ ID NO: 32274 - protein, 204 aa, Glycine max
  unsure (1)..(204): unsure at all Xaa locations
  Clone ID: TF_LIB4391-058-R1-K1-B5.pep
NWRTSVLVKGSMLSLEKWMLQVAEFHANAVVSVKPKKPSFKERKQKLLTFLQEKYEPVCAKWTTERCAVCRWVEDWDYNKIIICNRCQIAVHQECYGARNVQDFTSWVCKACETPDIKQECCLCPVKGGALKPTDVDTLWVHVTCAWFRPEVSFASDEKMEPALGILSIPLNSFVKEIHGSCTQCCKCSTYFHAMCASRAXYRM

SEQ ID NO: 32275 - protein, 97 aa, Glycine max
  Clone ID: TF_GmC1741_5.pep
KFRMERGLERWTVDCSCGAKDDDGERMLACDICGVWRHTRCSDIHDTDPVPARFVCQKCQHSESKLKSSGHCKDETVTNVSGSSCFRNGLPVPSDVI

SEQ ID NO: 32276 - protein, 564 aa, Glycine max
  Clone ID: TF_GmC276_1.pep
EKPQPKVKWSKNNGQLVLPNRVTVLCNGVEVIIFPSLHIVVCKCGFCRTEKQALSAWERHTGSKLRNWRTSIRVKDSMLPLEQWMLQLAEFHATAQVPTKPKKPSLKERKHKLLTFLQEKYEPVHAKWTTERCAVCRWVEDWDYNKIIICNRCQIAVHQECYGARNVRDFTSWVCKACERPDIKRECCLCPVKGGALKPTDVDTLWVHVTCAWFRPEVSFASDEKMEPALGILSIPSNSYVKICVICKQIHGSCTQCCKCSTYFHAMCASRAGYRMELHCLEKNGKQTTKMVSYCAYHRAPNPDTVLIMQTPLGVISTKSLLQTKKKTGSRLISSSRKKQDDSPVDNTEHEPFSAARCRIFQRTNHTKKRAADEAVSHRVRGPYHHPLDAIESLNTHRVVHEPQAFSSFRERLYHLQRTENDRVCFGRSGIHGWGLFARRNIQEGDMVLEYRGEQVRRSIADLREARYRLEGKDCYLFKISEEVVVDATDKGNIARLINHSCMPNCYARIMSVGDEESRIVLIAKTNVVAGDELTYDYLFDPDEPEENKVPCLCKAPNCRKFMN

SEQ ID NO: 32277 - protein, 128 aa, Glycine max
  unsure (1)..(128): unsure at all Xaa locations
  Clone ID: TF_uC-gmflminsoy049c10b1.pep
MKGGRSHRPRSSDPPDEWVDGSWTVDCICGVTFDDGEEMVKCDXCGVWVHTRCSRYVKGDDTFSCDKCKARHNKNNTTTNNSNNNSNSTTNPMETEVAQFLVELPTKTISMDNKKALLCRPRLWTDSP

SEQ ID NO: 32278 - protein, 333 aa, Glycine max
  Clone ID: TF_GmC6775_1.pep
MIQNADMRLESGTCNVCSAACSSCMHPNRALMGSKAEEFSDENCRLGEVNQYCDESDRSSLGSRACERLKHGVSETSHKPSVSSTHDSLSENAENSQALSEKYQDSKCLESLDDSTSCISRTSNANLASSCHQINTDRINISCSSTSVSHLVAEGSGNGPTVDISSLSECCMENVDSSLTKERVPIIVPGEKSLADKENLNNGTAKVSIEICPKSEEDTENNVDVAEDDDHKYSAHDGLHEKVEELIKSSGRAEPQSEDESDESDVVEHDVKVCDICGDAGREDLLAICSRCSDGAEHIYCMREMLEKVPEGDWLCEECKCAEETANRKLDIE

SEQ ID NO: 32279 - protein, 36 aa, Glycine max
  unsure (1)..(36): unsure at all Xaa locations
  Clone ID: TF_jC-gmXLIB3563P061bd07a2.pep
GGDLICCDGCPSTIHQSCLXIHMXXPXEWLXLSLKV

SEQ ID NO: 32280 - protein, 49 aa, Glycine max
  Clone ID: TF_5819965.pep
DNDDYGDILCGVCGENYGTDEFWICCDICDKWFYGKCVKIILARVELIK

SEQ ID NO: 32281 - protein, 180 aa, Glycine max
  Clone ID: TF_GmC195872_1.pep
MKGGRSHRPQSSDPPDEWVDGSWTVDCICGVTFDDGEEMVKCDECGVWVHTRCSRYVKGDDTFACDKCKARHNSNSNNTTTTTTNTTNPMETEVAQFLVELPTKTISMDNKKALPSRPRLWTDKPIEERVHVQGPPGGDPSIFAGQSASSIFTPQLWKACGYVPKKVSFKYNEFPFLNMI

SEQ ID NO: 32282 - protein, 140 aa, Glycine max
  Clone ID: TF_GmC1724_4.pep
MDLVPSVKEKLNYFRIKELKDVLTQLHLSKQGKKQDLVDRILSVLSDEQVSKIWAKKNAGGGKEQVAKLVDDTYRKMQISGATDLASKGQGASYSSSVKVKSECDDAFQPDVKIRCLCGSRFKTEKLVKCEDARCHVWQH

SEQ ID NO: 32283 - protein, 302 aa, Glycine max
  unsure (1)..(302): unsure at all Xaa locations
  Clone ID: TF_GmC454_8.pep
MMESEGEAGAKPMKTLGGKICQICGDNIGNNVNGDPFIACDVCAFPVCRACYEYERKDGNQSCPQCKTRYKRHKGSPAILGDQEEDGVADEGASDLNYNSENQNEKQKIERMLGWQMAHGRAEEAVAPNYDKEVSHNHIPLLSGGQEVSGELSAASPERLSMASPGGRGKRVHNLQYSSDLNQSPNIRVGDPGLGNVAWKERVDGWKMKQDKNVAPMSTGQATSERGAGDIDASTDVLVDDSLLNDEARQPLSRKVSIPSSRINPYRMVIALRLVILCIFLHYRITXPVPNAYAXLWLISVI

SEQ ID NO: 32284 - protein, 60 aa, Glycine max
  unsure (1)..(60): unsure at all Xaa locations
  Clone ID: TF_LIB3242-276-Q1-J1-D1.pep
KTQNNKXXIHKIVKHTGLFCHGKKEQSKLSEESYTGKIKAGKVGTNLKYLFSSIEPDERG

SEQ ID NO: 32285 - protein, 123 aa, Glycine max
  Clone ID: TF_GmC454_7.pep
MTESEEAGAKPMNTLGGQVCQICGDNIGNNVNGDPFIACDVCAFPVCRACYEYERKDGNQSCPQCKTRYKRHKGSPAILGDQEEDGVADEGASDLNYNSENQNEKQKIEHSHWLPQGSPEGAD

SEQ ID NO: 32286 - protein, 437 aa, Glycine max
  Clone ID: TF_GmC8684_5.pep
MEPQLQPKLEPAPELVSAGAEDSEKSHVSDVTEVRHVAMAEANAGCCASVLKRKRGRPAKGSRVPKGMTPPSRQKKEEEDVCFICFDGGSLVLCDRRGCPKAYHPWCIKRDEAFFRSKAKWNCGWHICSACGKGSHYMCYTCTYSLCKRCTKNADFVSIRENKGLCGICKRTIMLIENCAQGDKAECEVDFDDKSSWEYLFKVYWMYLKEKLSLTFDEILQAKNPCKGVARLEASGVAVDVSSLLLSPKMELPINNFANDKPWHYQDPTGKVQGPFSLLQLYKWNACGYFPSDLRIWRVDETQNNSIFLTDVLNGKCSKNVSLPNNSQQLSLGTNSTLENKENSQDGGENENNATRNGNSANHQIVEQCDEQKVADTYTQSNGKDESVRSNGWNSQSPGLTIQADGNNNEGQSGNSERMEESPKCEISCHDIPHVYT

SEQ ID NO: 32287 - protein, 184 aa, Glycine max
  Clone ID: TF_GmC77995_1.pep
MDTKGRLVAGSHNRNEFVLINADETARVAVTELSGQICQICGDELEVTVNGEPFVACNECAFPVCRPCYEYERREGNQVCPQCKTRYKRIKGSPRVEGDEEEDDTDDLESEFDIGSVFSARLNYGSQVNGSVIHAPSEFDAASVASEIPLLTYGQEDVGISADKHALILPPFTASRETGVCHAF

SEQ ID NO: 32288 - protein, 531 aa, Glycine max
  Clone ID: TF_GmC1432_1.pep
VVCNGMEGFYIPKLHLVMCKCGSCGSRKQTLSEWEKHTGCRSKKWKHSVKVKSTMLPLEKWMEENIPLDGIPEQVDQQQVLAFLQEKYEPVNVKWTTERCAVCRWVEDWEDNKIIICNRCQIAVHQECYGAKNVQDFTSWVCRVCETPDVERECCLCPVKGGALKPTDVEMLWVHVTCAWFRPQVVFQNHEAMEPAMGILKIPPNSFVKTCVICKQSHGSCISCCKCSTYFHVMCASRAGYTMELHSMEKNGTQVTRKLIYCAIHRVPNPDSVLVVHTPLGIFSPRTSLQNQKGCFRGSRLILSKNIELNESSTTENDLVEPLSAARCRVYRRSPNKRADVPIIHLLGGPSLHSLGAITQLNIFKDADESKVFTSFKERLHHLWETEKFRVCFGKSGIHGWGLFARRDIQEGEMVVEYRGVHVRRSVADLREEKYRSEGKDCYLFKISEEVVVDATNRGNIARLINHSCMPNCYARIMSLGDQGSRIVLIAKTNVSAGEELTYDYLFDPDERDELKVPCLCKAPNCRRFMN

SEQ ID NO: 32289 - protein, 184 aa, Glycine max
  Clone ID: TF_GmC96941_1.pep
MEAVCLHCGDRGFPETLVFCSQCKAYALHRYCLKGPVIFTDAVTWFCEDCATKLWVPPALDQSTPISSVTRKNCVLGVKKHNKQQKKKVKKKQKEGKANSVLVAETKVVLSGSHSSPGPEHPQCSNRGEEYEVKNDCGPAPRDVANFVAGEEESVARDIANSDEGFKSVPVSQGANNSDSGWVE

SEQ ID NO: 32290 - protein, 468 aa, Glycine max
  unsure (1)..(468): unsure at all Xaa locations
  Clone ID: TF_GmC454_10.pep
EFPRRPTRPGAQVCQICGDGVGKTVDGEPFVACDVCAFPVCRPCYEYERKDGNQSCPQCKTRYKRHKGSPAILGDMEEDGAAAADASDFNYDSENQNQNQNQKQKISERMLSWQLTYPRGEEVGAPNYDKDVSHNHIPLLTSGQEVSGXELSAASPERLSMASPAVGGGKRVHNIPYSSDINQSPNIRAGDPGLGNVAWKERVDGWKMKQEKNVVPMSTGQAASERGAGDIDASTDVLVDDSLLNDEARQPLSRKVSIPSSRINPYRMVIMLRLVILCIFLHYRITNPVPNAYPLWLVSVICEIWFAISWILDQFPKWLPVNRETYLDRLALRYDREGEPSQLAAVDIFVSTVDPLKEPPLVTANTVLSILAVDYPVDKVSCYVSDDGAAMLTFEALAETSEFARKWVPFSKKYSIEPRAPEWYFSQKIDYLKDKVHPSFVKDRRAMKREYEEFKVRINGLVSKAQKV

SEQ ID NO: 32291 - protein, 83 aa, Glycine max
  Clone ID: TF_700735931H1.pep
LICCDNCPSTFHLACLSTQEIPDGDWYCTNCTCRICGNLVIDKDTSDAHDSLQCSQCEHKYHEKCLEDRDKQEVAISDTWFCG

SEQ ID NO: 32292 - protein, 90 aa, Glycine max
  Clone ID: TF_GmC340979_1.pep
KLSSQRFPCDNSAPVIFIPVDQNLPDNIFESAQSNACVVCRGREPEDLLESCDVCHIRKIHSYCMDPPLRPWICPHCKELRMHYRSNHLY

SEQ ID NO: 32293 - protein, 97 aa, Glycine max
  Clone ID: TF_LIB4390-044-R1-N1-E9.pep
DLAVPVFYDPGGPLCGACGGPFGPDEFWICCALCQKWFPGKCVKIPPVRAGPFHPFRCPFSRTKRARPCLPWAQFPPFPSLLGPVFLLFFLDVPVNG

SEQ ID NO: 32294 - protein, 438 aa, Glycine max
  Clone ID: TF_GmC47902_1.pep
HGWAHEIAQLPCDSDGVCMLCKLKPSPSQTLSCGTCATPWHLPCLPSPPLSLSDSHWDCPDCSDTFCHHPVAPTAHLVSAIHAIQADTSLTDQQKAIKRQQLLAGSAHPSKDKTKAKDIFDGSLNCSICMQLPDRPVTTPCGHNFCLRCFEKWIGQGKRTCANCRAQIPTKMASQPRINSQLAMAIRLAKAAKSEGSSGPPKVYHCPRNQDRPDTAFTTERAKKTGKANACSGKIFVTVPPDHFGPIPAENDPTRNRGVLVGDTWEDRMECRQWGAHLPHVAGIAGQSAYGSQSVALSGGYEDDEDHGEWFLYTGSGGRDLSGNKRTNKLQSFDQSFIKNRACGGGRTLRAQKNVMKCPSCSNDIADFLQNPQVNREMLAVIESLQRQAEENSEELSDKNDENLHDPTEVSKPSDSTDKVLEEIKDNELNQPHKRRKE

SEQ ID NO: 32295 - protein, 709 aa, Glycine max
  Clone ID: TF_GmC961_1.pep
MRLVRMSLQQLSADSEGACMVCKGLPGQEERLLCVTCDTPWHVPCLFAPPPTLSATARWLCPDCSILDSDVPPVPAPARNQLVAAMLAVENDASLTQHDKARKRQELLTGKAPADDDDDDEQENKSSLSDILSRSLNCSICIQLPERPVTSPCGHSFCLKCFEKWVRQGKRNCAKCRQIIPAKMTSQPRINSALVFAIRMARQASNSSGSGRGGVRSVNHFLHNQDRPDEPFTTERAQRSGRANAASGKIFVTVPTDHFGPITAENDPLRNQGLLVGESWRDRLECRQWGAHFVPVGGIAGQSDRGAQSVVLSGGYVDDEDHGEWFLYTGSGGKDLSGNKRTNKSHSFDQKFEKYNRALQVSCLQGYPVRVVRSHKEKRSSYAPETGVRYDGIYRIEKCWQIAGLQGFKVCRYLFVRCDNEPAPWTSDDHGDRPRPLPVIRELKKATVIHERTESPSWDFDEEDSRWKWKKPPPPSRQKVQNVEPVEVARAKSNKEVKKFQLKSIKEQLQRGFSCMICKEVMVSPVTTPCAHNFCKSCLEGEFAGQAFVKERSKGGRTLRSQKNVMKCPSCSIDISDYLQNIQVDIDLKSAIESLKAKVEEIGESVESSEDADGLQDDGAGKDEDTDSRNKNSVQELNGLPEGSDVGELEDTTNKEPDPAMKCNGKRKKGDYGNQSPDDKMEKRGKNYKTTEEELHEENDSSSSPLHPQ

SEQ ID NO: 32296 - protein, 223 aa, Glycine max
  Clone ID: TF_GmC251796_1.pep
GRRMRRKSRGKRRRAASATTLSPSSLSAIPILWDAYDTICIHCNNKGEEAKEDGLLICSGMGCPVAVHATCLATGPKFDGSGNFCCPYCWYKRAVDTCRRLREKALEAKGDLSRFLDNHDHARAAAHVDLVVQDSEELMEETGTQAQSKDNKDEEGEARVNQVHDREESETEPEENKEKEGKVRDDEELVEERERKTVTEAQSQENKDEEDKFQDDSEELVVE

SEQ ID NO: 32297 - protein, 88 aa, Glycine max
  Clone ID: TF_LIB3242-613-P1-J1-D12.pep
MEACTGLFAGTPNSNELVVIQGHDEPKPVKNLDGQLCEICGDSVGLTVDGDLFVACEECGFPVCMPCYEYERREGTQVCPQCHTRYKR

SEQ ID NO: 32298 - protein, 134 aa, Glycine max
  Clone ID: TF_jC-gmXLIB3563P056bc07a2.pep
MGDVVTVCDICGDQGFEEYLAICNKCPDGAEHIYCNDEKLEKVPDGDWWTCEDCRKSPGNELPTLGSQTEIEHAQCSPLLNSEFNGQLTNREVEKNVAIHDTRKRKNLGLLSKSVSFDNASSAKLNGKCSEVIA

SEQ ID NO: 32299 - protein, 828 aa, Glycine max
  Clone ID: TF_GmC838_1.pep
MEASAGMVAGSHKRNELVRIRHDSSDSGSKPMKNLNGQICQICGDTVGLTATGDVFVACNECAFPVCRPCYEYERKDGNQSCPQCKTRYKRHRGSPRVEGDEDEDDSDDIENEFNYAQGKAKARRQWEDDPDLSSSSRRESQQPIPLLTNGQTMSGEIPCATPDTQSVRTTSGPLGPSEKVHSLPYVDPRQPVPVRIVDPSKDLNSYGLGNVDWKERVEGWKLKQEKNMVQMTGRYTEGKGGDVEGTGSNGEELQMVDDARQPMSRVVPIPSSQLTPYRVVIILRLIILGFFLQYRVTHPVKDAYPLWLTSVICEIWFALSWLLDQFPKWSPINRETYLERLALRYDREGEPSQLDPVDVFVSTVDPLKEPPLVTANTVLSILSVDYPVDKVSCYVSDDGSAMLTFEALSETAEFAKKWVPFCKKHNIEPRAPEFYFAQKIDYLKDKIQPSFVKERRAMKREYEEFKVRINALVAKAQKMPEEGWTMQDGTPWPGNNPRDHPGMIQVFLGHSGGLDTDGNELPRLVYVSREKRPGFQHHKKAGAMNALIRVSAVLTNGAYLLNVDCDHYFNNSKALKEAMCFMMDPVLGKKTCYVQFPQRFDGIDLHDRYANRNIVFFDINMKGQDGVQGPVYVGTGCCFNRQALYGYDPVLTEEDLEPNIIVKSCWGSRKKGKGGNKKYSDKKKAMGRTESTVPIFNMEDIEEGVEGYDDERTLLMSQKSLEKRFGQSPVFIAATFMEQGGIPPSTNPATLLKEAIHVISCGYEDKTEWGKEIGWIYGSVTEDILTGFKMHARGWISIYCMPPRPAFKGSAPINLSDRLNPGPPWGL

SEQ ID NO: 32300 - protein, 214 aa, Glycine max
  Clone ID: TF_GmC838_2.pep
MEASAGMVAGSHKRNELVRIRHDSSDSGSKPLKSLNGQICQICGDTVGLTATGDVFVACNECAFPVCRPCYEYERKDGNQSCPQCKTRYKRHRGSPRVEGDEDEDDSDDIENEFNYAQGKAKARRQWEDDADLSSSSRRESQQPIPLLTNGQTMSGEIPCATPDTQSVRTTSGPLGPSEKVHSLPYVDPRQPVPVRIVDPSKDLNSYGLGNVDW

SEQ ID NO: 32301 - protein, 199 aa, Glycine max
  Clone ID: TF_GmC1270_1.pep
MTTKGTTHSEPNNTECCMCGDLGFSDQLFQCKACQFRSQHRYCSNLYPKPESLGTCNWCLSQREDTKERSTNSSNSSSSIRNNDDESRIKRIRNGNSYNSAQNIGPVKKGVKGSVLHLQIHKPIKKPKSPESSRSPSASNSPPKSSPVLVSTRKRIVTNGTLEERLRRTRSEDITRSGATKQVFRNKVRRYKLLDEVSS

SEQ ID NO: 32302 - protein, 118 aa, Glycine max
  Clone ID: TF_GmC216911_1.pep
PAFSLTSPSLSAIPILSDEHNNNAPTAFDTDCDDDNNALHHRGSEPEPEPELEPVDIFDKTICIHCDNKREEAEGVLICGGRGCPVAVHATCLGFEPEFDDSGNFCCPYCWYKRAVDT

SEQ ID NO: 32303 - protein, 101 aa, Glycine max
  Clone ID: TF_LIB3242-327-Q1-J1-E10.pep
MAPATTNSSPSAQRHVGFSRRTQAPRQLDGDSPPVKKYRMLSEIMARAPYAVVERETYSDLLCDQCGSGELPEELLLCDKCDKGFHMKCVRPIVVRIPIGS

SEQ ID NO: 32304 - protein, 586 aa, Glycine max
  Clone ID: TF_GmC760_1.pep
MEQLVRAIKMGLFEFSPQDELEGELVYFQHRLLQNAVAKKRHIDNLIYSVAKSLPHEIDKAHQQRWDEVIVNQYLRDLREAKKQGRKERKHKEAQAVLAAATAAAAASTRALRKDNLDESMQQENLLKLDTLNGRTGACSQPMSRAKRRQKGVAVTRTSSEKYSEFCMPTSDLSKEQCKSCDICRRSEFILNPILVCSGCKVSVHLDCYRSVKETTGPWYCELCEDLSSRSSGAAAINFWEKSVVECALCGGTTGAFRKSSDGQWVHAFCAEWVFESTFKRGQIDAVEGMETLQKGVDICCICHHKHGVCMKCCYGHCQTTFHPSCARRAGLYMNVRPTGGKAQHKAYCEKHSLEQKAKAETQKHGIEELKSIRQIRVELERLRLLCERIVKREKIKRELVISSHDILAFKRDHVARSVLARSHFILPDGSSESATTSLKGNTEGYRSCSEPLQRSDDVTVDSSVSAKRRVRVAISMDTDPKLDDDCSTSQSRYNHKILDRSQFSGKKVPQRAAASRNISDEGGWRSKSRKHSETFGKELVMTSDEASMKNSMLPKGYAYVPADCLSNEKHSNEDVYASEPVEHDR

SEQ ID NO: 32305 - protein, 881 aa, Glycine max
  Clone ID: TF_GmC4344_1.pep
MESFFTEVTAYPPAHVVHEKLSEMKMDNNNADDKMPIAEPVKYDEPANLARPENIKTEKETGQDRKENVVQTSENAAGTKSGKPKIKGVSLTELFTPEQVREHITGLRQWVGQSKSKAEKNQAMEHSMSENSCQLCAVEKLTFEPPPIYCTTCGVRIKRNNMYYTTGTGDTRHYFCLPCYNDARTENIIVDGTPIAKSRLEKKKNDEETEEWWVQCDKCEAWQHQICALFNGRRNDGGQAEYTCPNCYIQEIERGERKPLPQSAVLGAKDLPRTILSDHIEQRLFKRLKQERLERARLQGKSYDEIPGADALVVRVVSSVDKKLEVKPRFLEIFQEENYPTEFPYKSKVVLLFQKIEGVEVCLFGMYVQEFGSECQFPNQRRVYLSYLDSVKYFRPEVKAVTGEALRTFVYHEILIGYLEYCKKRGFTSCYIWACPPLKGEDYILYCHPEIQKTPKSDKLREWYLAMLRKAAKENIVVDLTNLYDHFFVSTGECRAKVTAARLPYFDGDYWPGAAEDLIYQLRQEEDGRKQNKKGTTKKTITKRALKASGQSDLSANASKDLLLMHKLGETICPMKEDFIMVHLQHACTSCCILMVSGNRWVCRQCKNFQICDKCYEAELKREEREQHPINQREKHTLYPVEITDVPSDTKDKDEILESEFFDTRQAFLSLCQGNHYQYDTLRRAKHSSMMILYHLHNPTAPAFVTTCNICRLDIETGQGWRCEVCPEYDVCNACYQKDRGADHPHKLTNHPSMADRDAQNKEARQLPVLQLRKMLDLLVHASQCRSAHCQYPNCRKVKGLFRHGMHCKIRASGGCVLCKKMWYLLQLHARACKESECHVPRCRDLKEHLRRLQQQSDSRRRAAVMEMMRQRAAEVANSSG

SEQ ID NO: 32306 - protein, 371 aa, Glycine max
  unsure (1)..(371): unsure at all Xaa locations
  Clone ID: TF_GmC832_1.pep
DNLDVVSCSVCQMGVLIRHPHKCNACQGYCHEGCSTRSTVSANEVEYLTTCKQCYHARLLAQKENTNESPTSPLLLQGRENNSGTFLNGSRPKSHDQVLKSSRTKANNPNVKQVTPVTALKXTKAKYYEQEPTSTRTKDNNHFGTPQVASEATLTGKKPRKNCSWGIIWQKKNNEDTDNDFWLRNILLKGGSNMPQLKPVCHLCRKPYMSDLTYICCETCRNWYHAEAVELEESKISSVLGFKCCKCRRIKSPVCPYSDLKPKRQEGKKSRTRTKKKEHSGADSDSGAIYYDMRDCEVATPVFHVEDDPSHVFPVEGDPTHVFPXRDDPLLFSLSSVELLTEPKMEGDVEWNSVPGPGLRKLPVRRNVSIE

SEQ ID NO: 32307 - protein, 154 aa, Glycine max
  unsure (1)..(154): unsure at all Xaa locations
  Clone ID: TF_GmC154798_1.pep
KKKRQRNNIDVDDASRLRRRTRYLLIKMKLEQNLIDAYSGEGWKGQSREKIRPEKELLRAKKQILKCKLSIRDAIHQLDSLSSVGSMXDSAIAPDGSVYHENIFCANCKLHEAFPDNDIILCDGTCNRAFYQRCLNPPLDTENIPPGDQGLFCK

SEQ ID NO: 32308 - protein, 452 aa, Glycine max
  unsure (1)..(452): unsure at all Xaa locations
  Clone ID: TF_GmC28830_1.pep
ISHKRGMKLRLMNGIAYNETWFGSWGYKFGRGCFGVTQSMYHKAIQAIRSMSLYLIIHHIANSSHGIPLIFSRNQTLSDQSLVTLGDLFCYMLDLKSCLPRETXISSYKTNALVETNCRWSPKRIEMATRVIVEALKRTEFKWVSRQEVRDAARAYISDTSLVDFVLRSLGNHVEGNYLVRXSLNLVTKVLEYCLEDISDVYPYNEGLVMSNKVXTSIRRAQLMKDMLYLYKYILIDXKPIMRSEFLSAIPLAARIILGTKYFIKDYFGDIPHQVELGSDDKLNIYCTIWLRNNVGSGXYLNKAIMPPHECITLKRNATINDLKLEVERDFREICXELRSFMVESFGNLSVNNETMAFGLIEVGGKVVLEGWHGXHMNXMIEQICESDMNNGIMDCTCGTIEDDGERMVSCDICEIWQHTRCVXIPNDEEIPHIFLXCKKCEQEIVLFPSLP

SEQ ID NO: 32309 - protein, 136 aa, Glycine max
  unsure (1)..(136): unsure at all Xaa locations
  Clone ID: TF_LIB4167-058-R1-N1-G3.pep
LKSYGHCWYCPSCLCRVCLTDXDDDXIVLCDGCDHAYHIYCMKPPRTSIPRGNWFCRKCDAGIQAIHQAKKAYEFNKPRRNGEDAAKPNANLEKKXHNKRARELESGGAMDMLLTAANTLNFEEKEAASHIKLQRT

SEQ ID NO: 32310 - protein, 673 aa, Glycine max
  unsure (1)..(673): unsure at all Xaa locations
  Clone ID: TF_GmC697_1.pep
MGYVHDGDLDLYTRNMELKMSKKVVPNCYPTNVKKLLSTGILDGAVVKYIYNPGKVELQGIIDGGGYLCGCSMCNYSRVLSAYEFEQHAGAKTRHPNNHIFLENGRPIYSIIQEIKTAXRDEVIKNVAGSSVNEESFQAWKESLLQSNGKVQAHKSYSTKLVGMPHTNISQSVESTSHLSSLHVPSHYEQHMYMNQTTDEWKRVVKKPSSYTSNSGVLQKRSADGCTKRRDNDLHRLLFMPNGLLIVSEFSYYVKXCKLLGGYKQGNGIVCGCCDIEISPSQFEAHAGMAARRQPYRHIYTSNGLTLHDIALSLANGQNLTTGDSDDMCAVCGDGGDLILCNGCPRAFHAACLGLQCVPDSGWQCLNCIDNAGNGRESSIVRPIMIRLTRVDKTPEVEMGGCVVCREHDFSVAKFDERTVIICDQCEKEYHVGCLRDMGLCELEELPKDKWFCCDDCNRIYAALQNSVSAGAEIIPASFSELIIRKHEDKGLCTYGAMNDIQWRILSGKSRYPEHLPLLSRAAAIFRECFDPIVAISGRDLIPVMVYGRNISGQEFGGMYCIVLIVNYVVVSAGLLRIFGRNVAELPLVATSRAHQGKGYFQVLFSCIERLLSSLNVEKLVLPAAGDAESIWTKKLGFRKMSEDQLSKHLREVQLTLFNKTSMLEKTVQLAIE

SEQ ID NO: 32311 - protein, 387 aa, Glycine max
  unsure (1)..(387): unsure at all Xaa locations
  Clone ID: TF_GmC24_1.pep
ENFQGMKPESVLDFSRVNSRMKEQAYEQSPTLFLSDIQQVWRKLQDAGNEIVALAKSLSNMSRTSYSELVGIPAQSTFQDEKQVEFDCCMKPEQTQACAMYKICSCKCCGEKADDTDCLVCDSCEEIYHVSCIEPAVKEIIPHKSWYCANCTANVIESLHENCVLCERLNDAKTLDDVIGDGSFPTIEETQNEFEENSNCTSDGIQVSIGEEKTPNCKICENEVDGGKIKICGHRFCSNKYYHVRCLTINQLKSYGHCWYCPSCLCRVCLTDQDDDRIVLCDGCDHAYHIYCMKPPRTSIPRGNWFCRKCDAGIQAIHQAKKAYEFNKPRRNGEDAAKPXANLEKKHNNKRARELESGGAMDMLLTAANTLNFEEKEAASHIKLQRT

SEQ ID NO: 32312 - protein, 317 aa, Glycine max
  Clone ID: TF_GmC1699_1.pep
MPSSHLGRNASSLALPKVERPQFKVDGGSNGSPYMLQVQANSSANQPLVNAPTWSIQTQAASLARSASENKVPVHNSVKVEGTPDATVSRAGTQITTDSSFRPFITQTAPGNLPSVHQPLPRTNIVQAPLIPSHTDIAKIVQKVLQPKLPVHPTWTPPSRDYMNKAFTCQMCELSVNEVDTVLLCDACEKGFHLKCLQPSVLRGIHNRVDWHCMRCLSLSGGKPLPPKYGRVMRSSNTPPKLPSNTGGVQPCSEKKVENIDPKVIPQTLATNGSSVPTVSGGHHNVELPSESKIPDTKDMQGTGISSTIEAIDKKPD

SEQ ID NO: 32313 - protein, 252 aa, Glycine max
  Clone ID: TF_GmC7106_2.pep
MDGGGVNYNPRTVEQVFRDFKGRRAGMIKALTTDVEEFFQQCDPEKDNLCLYGFPNEQWEVNLPAEEVPPELPEPALGINFARDGMQDKDWLSLVAVHSDAWLLAVAFYFGARFGFDNADRKRLFSMINDLPTIFEIVTGSAKKQTKEKSSISNHSSNKSKSGSKGRGSESGKYSKETKDEEEEVLDEEDDEEHEETLCGACGEHYASDEFWICCDICEKWFHGKCVKITPARAEHIKQYKCPSCSNKRARP

SEQ ID NO: 32314 - protein, 153 aa, Glycine max
  Clone ID: TF_GmC931_2.pep
TVLAIAFYFGARFGFDKADRKRLFNMINELPTIFEVVTGAAKKQVKEKSSVSNHSGSKSKSSSKQRASESQARQPKPLQSKEEDEELDDQDDDEHGETLCGACGEHYGTDEFWICCDICEKWFHGKCVKITPARAEHIKQYKCPSCSNKRARP

SEQ ID NO: 32315 - protein, 257 aa, Glycine max
  unsure (1)..(257): unsure at all Xaa locations
  Clone ID: TF_9985993.pep
KFNVVVSSEDGEKGEDENKDGEAVESEDELLVIEAIDDVAVEQAPPQDDKSQDISDSSVSLEWFLGCRNRVSLTSERPTKKRRLLGVEAGLEKVVMTCPFDEGQLFCHYCGRGDTGRDSNRLIVCASCKVAVHRKCYGVHDDIDEAWLCSWCKQKVDVDVSVNPCVLCPMKGGALKPVNSSXEGVGSVPFVHLVCSLWXPEVYIDDLKKMXPVMNXGEIKETPKKLMCXXCKAKCGACVPWNHGTSXLLSSLCPREA

SEQ ID NO: 32316 - protein, 239 aa, Glycine max
  Clone ID: TF_GmC52662_1.pep
MSFLEEFHANLDSLPVILRKKYTLLRDLDKSLQDIKRQNEQRCEQEIEDIKRGVRSGNITPDTSAIRFSDEALDEQKHSIRVADEKVALAVQAYDLVDTNIQQLDQYLKKFDEEIRRERENAAITGVPASGPEGNTKSGRGNESGTGRGGRKKTRQTTMVTEAQATSNPTGMDLELPVDPNEPTYCFCNQVSYGAMVACDNPNCKIEWFHFGCVGLKEQPKGKWYCSNCAATKNRRRSK

SEQ ID NO: 32317 - protein, 97 aa, Glycine max
  Clone ID: TF_GmC52662_3.pep
FQRGGRKKTRHTTVTPAATEAQATANPTGMDLELPVDPNEPTYCFCNQVSYGAMVACDNPNCKIEWFHFGCVGLKEQPKGKWYCSNCAATKNRRRSK

SEQ ID NO: 32318 - protein, 251 aa, Glycine max
  Clone ID: TF_GmC931_4.pep
MDSRTYNPRTVEEVFRDFKGRRAGLIKALTTDVEDFYNQCDPEKENLCLYGFPSEQWEVNLPAEEVPPELPEPVLGINFARDGMQEKDWLSLVAVHSDAWLLAIAFYFGARFGFDKADRKRLFNMINELPTIFEVVTGAAKKQVKEKSSVSNHSGSKSKSSSKAQASETQGRQSKALQTKDEDEELEEQDNDEHGDTLCGACGENYGTDEFWICCDICEKWFHGKCVKITPARAELIKQYKCPSCSNKRAR

SEQ ID NO: 32319 - protein, 494 aa, Glycine max
  unsure (1)..(494): unsure at all Xaa locations
  Clone ID: TF_GmC1724_2.pep
SDRVLLVSACASFVVVVIDFPVCDSRDSSRAELLGLTAWIWYRASRKLNYFRIKELKDVLTQLHLSKQGKMIWYLTIRSXKSIIVLHICCNLLSLTLLSXLFTFLYFLLCRKMQISGATDLASKGQGASDSSSVKVKSEFDDAFQPDVKIRCLCGSRLETENLVKCDDARCHVWQHISCVIIPEKPTEGIPLVPDKFYCELCRLTRADPFWVSVAHPLHPVKLTTTSNPTDGNNPVQSVERTFQLTRADKDLVSKPEFDVEAWCMLLNDKVPFRMQWPQYTDLQVNGVPVRATNRPGSQLLGANGRDDGPIITPYTKDGINKISLARGDARIFCLGVRIVKRRSMQQILNSIPKESDGEKFEDALARVCRCVGGGNAVDDADSDSDLEVVSDTFTVNLRCPMSGSRMKIAGRFKPCIHMGCFDLEVFVEMNQRSRKWQCPICLKNYALENIIIDPYFNRITSMMMNCGEEIAEIEVKPDGSCRVRXKSESERLE

SEQ ID NO: 32320 - protein, 140 aa, Glycine max
  Clone ID: TF_uC-gmrominsoy277f07b1.pep
MIWYLTIRKMQISGATDLASKGQGASDSSSVKVKSEFDDAFQPDVKIRCLCGSRLETENLVKCDDARCHVWQHISCVIIPEKPTEGIPLVPDKFYCELCRLTRADPFWVSVAHPLHPVKLTTTSNPTDGNNPVQSVERTF

SEQ ID NO: 32321 - protein, 151 aa, Glycine max
  Clone ID: TF_jC-gmro02910013g08a1.pep
MDLVASCKEKLQHFRIKELKDVLTHLGLSKQGKKQDLVDRILAILSEDQVSKLWTKKNAVGKQEVAKLVDDTFRKLQVSGAIDLASKGQGASDSSNVKIKGEIDDSYQSDTKIRCLCGNVFDTEPLVKCEDTRCHASQHISCVIIPEKPMD

SEQ ID NO: 32322 - protein, 198 aa, Glycine max
  Clone ID: TF_GmC2696_3.pep
MAMAEDTEEKSAAVSGGKRRRGAGKNAKATGRVASRKKMEEDVCFICFDGGDLVLCDRRGCPKAYHPSCVNRDEAFFRAKGKWNCGWHLCSNCERNASYMCYTCTFSLCKGCIKDAVILRVRGNKGFCETCMRTVMLIEQNEQGNNVGQIDFDDRNSWEYLFKDYYIDIKKKLSLTFDELTQAKNPWKGSDMLLSKEE

SEQ ID NO: 32323 - protein, 240 aa, Glycine max
  unsure (1)..(240): unsure at all Xaa locations
  Clone ID: TF_GmC5215_1.pep
MEMASTPRTVEEIFKDYTARRTAIVRALSQDVDEFYGLCDPDKENLCLYGHPNETWEVTLPAEEVPPELPEPALGINFARDGMNRRDWLSLVAVHSDSWLLSVAFYLGARLNRNERKRLFSLINDLPTVFEVVTDRKXPVKDKPTADSGSKSRGSTKRSSDGQVKSNPKFADEGYEEDDDEHNETLCGSCGGNYNADEFWIGCDICERWFHGKCVKITPAKAESIKQYKCPSCSLRRGRP

SEQ ID NO: 32324 - protein, 239 aa, Glycine max
  Clone ID: TF_GmC5215_2.pep
MDMASSPRTVEEIFKDYGARRTAVIRALTHDVDEFYGLCDPDKDNLCLYGHPNEAWEVTLPAEEVPPELPEPALGINFARDGMNRRDWLSLVAVHSDSWLLSVAFYLGARLNRNERKRLFSLINDLPTVFEVVTERKPVKDKPTADSGSKSRGSTKRSSDGQVKSNPKFADDGYEEEDDEHSETLCGSCGGNYNADEFWIGCDICERWFHGKCVKITPAKAESIKQYKCPSCSLRRGRP

SEQ ID NO: 32325 - protein, 297 aa, Glycine max
  Clone ID: TF_GmC37050_1.pep
MLIQTSVLSSVEAGLCYVSDDGKDVLCDRMPSGETWQVGLKCNKYPLDWCRKAEPVEEDKRNADDPRAASARGSFGQPSTASIMTENTTPNMVYRRKKLCKDSNFDLGPTNVQASANCPSVISSAAHLSSAEDQPTGFQVKHEIEMVKDPTMPSVLFDRVAKDSTHKNLGINSVNDSCSSSKPNMETEMDETGECSSSIIVMDCTREEVTEKDFCINILRSHGLLKEDSPVDNVASGEDAVTTGNNCCSRSCKICGDLDSSLNMLLCDHCEDAYHLSCYNPRLKKLPIDEWFCHSCR

SEQ ID NO: 32326 - protein, 514 aa, Glycine max
  Clone ID: TF_GmC1309_1.pep
MENKSDMGSSTPQDPHGSDDISSSLANEMNDECSDASQELNNQVLVDGIICSKSHSGEMMSDPVSDKCISPSRTSHSELEMKNKVVAAPPCGICGDGGDLICCDGCPSTFHQSCLDIQMLPPGEWHCPNCTCKFCGIASGTSDKDDASVYILQTCILCEKKYHNSCTKEMNTLPNKINSSSLSFCGKECKELSEHLKKYLGTKHELEAGFSWCLIHRLDEDSEAACRGLSQRVECNSKLAIALTVMDECFLPVIDRRSGINLIRNVLYNSGSNFSRLSYSGFYTATLERGDEIIASASIRFHGTQIAEMPFIGTRHIYRRQGMCRRLFSAIESALCSLKVEKLVIPAIAELTHTWTTVFGFTYLDESLRQEMKSLNMMVFPGIDMLQKLLVEQGNREGSEKMENGNNDFIKTKMGNRSDMGFSTPQGPRGSDDVSSNPANETNDECSDASQELYNQVLVDGIICSQSHSEEMMSDPISDKCDSPSRTSHSELKIEVIHVPQKKTLTRSVTRPLL

SEQ ID NO: 32327 - protein, 442 aa, Glycine max
  unsure (1)..(442): unsure at all Xaa locations
  Clone ID: TF_GmC121288_3.pep
HASATRTGEAVVDIQDRLPEARVVYCSATGASEPRNMGYMVRLGLWGDGTSFTDFREFLGALDRGGVGALELVAMDMKARGMYLCRTLSYEGAEFEVIEAPLEDKMMDMYKKAAEFWAELRVELLSASAFLNDKPNSSQLWRLYWASHQRFFRHICMSAKVPAAVRLAKQALVEEKSVVIGLQSTGEARTEEAVTKYGSELDDFVSGPRELLLKFVEENYPLPEKPELLPGXEDGVKELQRKXRHSATPGVSVKGRVRKVAKWQPPSDAESDEESESDSGIESTDSDDEFQICEICTTEEERKKLLQCSCCSKLVHSTCLMPPIGDIVPEEWSCHLCKEKTDEYLQARQAYIAELQKRYDAASERKTKILDIIRALDLPNNPLDDIVDQLGGPDKVAEMTGRRGMLVRASLEKGVTYQARNTKDXTMEMVNMHEKQLFMGCK

SEQ ID NO: 32328 - protein, 433 aa, Glycine max
  unsure (1)..(433): unsure at all Xaa locations
  Clone ID: TF_GmC1708_1.pep
KTTACKDAETKKYVSELNAEEDDVDGNGDECRLCGMDGTLLCCDGCPAVYHSRCIGVMKMHIPEGAWYCPECKIDMIGPTIARGTSLKGAEVFGKDLYGQVFMSTCNHLLVYXTSFVDGFCLKYYNQNDIPRVLQVLYASEQHRPIYNGICMAMLEYWNISEKFLPICVSRLTPMVEEEHKAVSSVKEEYSLMFGNGICGDNLVPSLDASLVTTRSPAPGSSGNARTTCKGSLTNDFVYMGCSYKPQSYINYYMHGDVAASAAANLAVLSSEDSRSEGHVSGNLGKATSGNTYLLAKAFSQTASRFFWPSSEKKLVEVPRERCGWCISCKASVSSKKGCMLNHAAISATKSAMKILSGLAPVRSGEGIIPSIATYVMYMEESLRGLIVGPFLSECYRKHWRKQVERAKSFSDIKPLLLKVSDCYFESRRFINF

SEQ ID NO: 32329 - protein, 982 aa, Glycine max
  Clone ID: TF_GmC256_1.pep
MGNTNSSGQKPALHGDISESKKLTSDLRAPSASAVGVAHSNEKLRTVSYSTKNQNGFTLPRILDESSGREGNNCDNNKVKRASKGVKSISVEVSGKGNDFIKEDEPISLLPQKRINEASFTKLKSRKKTCVPSANGKSQGLKVTSQVDEPPEVDDYFSIGKDGINNSNTCLVLKPSGSTSNSLAFDELFSRNANPESVQCDNVCQNSPKTAVQSLSESKINGKPDITDSGMQQVDGDEAEQHNVTRNLDCSSLGNKKSCNVESAGCTKLDLITEESNKLVRNSPRKKSVAKRSLGSKPKLGATAKQKKSLSLTKTSLQGEGVTCSSGSKEIATCDAKMHQGCPKIFDVNKTTEQEIVGKNAEDAGDRTEFLDDETEAPDDKCEYELGMALDEDLVHLSKKPYTAKEEKSEAICPATKCEEAMPPKKGTNKTEKQKTSSLPVKHQARKGSAGKVKATVSKYAEDDGDRTELVNDEIEAPDDKCEYELRMALNEESHLSKKSDTATEEKSEVICPATKCEETMPPKKGTKKTEKQKPSSLVVKNQARKCPAGNAKATVAKELSKSNMAVSGEKIPNETGHEPEIETMEEMSLPDDKSDESAVQRNKSENFSEEKENKPIDGEQGRSNGNPTIKSSVRPAKIKSKKSGLNPSITESNTRVKTEAACFILSGHRLQRKEFQQVIKRLKGRVCRDSHQWSYQATHFIAPDPIRRTEKFFAAAASGRWILKTDFLTASSQAGKLLAEEPYEWHQNGLSEDGTINMEAPRKWRLLKERTGHGAFYGMRIVVYGDCIAPPLDTLKRVIKAGDGTILATSPPYTRFLGTGIDYAVVSPGMPRVDTWVQEFLKHEIPCVVADYLVEYVCKPGFSLERHVLYGSHAWAEKSFDKLKSKAEEIVEELVAPEDSRDDDIICKVCGSRDRGDVMLICGDESGSVGCGIGTHIDCCDPPLTAVPEEDWFCPKCSSTRNCSNKPSKRKKTVLSSSKCT

SEQ ID NO: 32330 - protein, 424 aa, Glycine max
  Clone ID: TF_GmC310_1.pep
NCLRSWGRNRDLFHWSSWTCPLCRICEACRRTGDPSKFMFCKRCDGAYHCYCLQPPHKSVCNGPYLCTKHARCHSCGSNVPGNGLSVRWFMSYTNCDACGRLFTKGNYCPVCLKVYRDSESTPMVCCDSCQLWVHCQCDNISDEKYHQFQLDGNLQYKCPTCRGECYQVKNPEDAAREIWRRRNIAERDLIASLRAAAGLPTQEEIFSISPFSDDEDSGPLKLKSESARSFKFSLKNLANDSPKKKSSSKKTAKKKDSQLFMTSKIDTHNSCEGHSDIKSLHSLDDDKNDDIQSQRNEGPDVYSSPATGSLSQTEASFPINQPGILKQKFVDEVMVSDEERKPRVVRIKSNKALIPDSEEESGKHSLKTQNVKGKKLVINLGARKINVASSPRSDTSSCQKDQDPVTVNGNDDSFCWSCHYIFA

SEQ ID NO: 32331 - protein, 58 aa, Glycine max
  Clone ID: TF_GmC126_7.pep
VFCRYHPACVGMTIEEAKKLEHFVCSECSSDDDMKKPHATFSVSPGSDVKVEPKRRKR

SEQ ID NO: 32332 - protein, 252 aa, Glycine max
  Clone ID: TF_701130201_FLI.pep
MEGVPHPIPRTVEEVFTDFKGRRAGLIKALTTDVEKFYQQCDPEKENLCLYGFPNETWEVNLPVEEVPPELPEPALGINFARDGMQEKDWLSLVAVHSDSWLLAVAFYFGARFGFGKNERKRLFQMINDLPTIFELVTGSARQSKDQPAAHNNGSKCKSSGKSRQSESQAKGMKMSAPPKEEDESGEEEEEDDEQGATCGACGDNYGTDEFWICCDMCERWFHGKCVKITPAKAEHIKQYKCPSCSNKRVRV

SEQ ID NO: 32333 - protein, 252 aa, Glycine max
  Clone ID: TF_GmC121_1.pep
MEGVPHPIPRTVEEVFTDFKGRRAGLIKALTTDVEKFYQQCDPEKENLCLYGFPNETWEVNLPVEEVPPELPEPALGINFARDGMQEKDWLSLVAVHSDSWLLAVAFYFGARFGFGKNERKRLFQMINDLPTIFELVTGSAKQSKDQPAAHNNGSKCKSSGKSHQSESQAKGMKMSAPPKEEDESGEEEEEDDEQGATCGACGDNYGTDEFWICCDMCERWFHGKCVKITPAKAEHIKQYKCPSCSNKRVRV

SEQ ID NO: 32334 - protein, 91 aa, Glycine max
  Clone ID: TF_jC-gmXLIB3563P058ah04d2.pep
QSRQSESQAKGMKMSAPPKEEDESGEEEEEDDEQGATCGACGDNYGTDEFWICCDMCERWFHGKCVKITPAKAEHIKQYKCPSCSNKRVRV

SEQ ID NO: 32335 - protein, 355 aa, Glycine max
  Clone ID: TF_GmC3892_3.pep
RPGKELLWPKLDILRRKLKSRGLFQSVDSLCAEGKFPESLFDSAGEIDSEDIFLRLREDDRRGTNNDIILCDGVCDRGFHQLCLDPPLLTEDIPPGDEGWLCPGCDCKDDCMDLVNDSFGTSLSISDTWERVFPEAASFAGNNMDNNLGLPSDDSDDDDYNPNGSDDVKIEGDESSSDESEYASASEKLEGGSHEDQYLGLPSEDSDDGDYDPDAPDVECKVNEESSSSDFTSDSEDLAAAIEDNTAPGQDGLIMFGEHIFIFIVKLAICHEFSLRLANGSTIHVGASGIHHKWKPILVEMLHRKLPMAGLKMRGRSNVNQCLRRSVEKTLKPQALENGSICQNPYLKHSWISMA

SEQ ID NO: 32336 - protein, 228 aa, Glycine max
  unsure (1)..(228): unsure at all Xaa locations
  Clone ID: TF_GmC931_1.pep
MEALSRSVEEIFEDFQGRRAGIIKALTTDVEDFYSQCDPEKENLCLYGFPNEQWEVNLPVEEVPPELPEPVLGINFARDGMLEKDWLSLVAVHSDTWLLALAFYFGARFGFDKTDRKRLFGMINELPTIFEVVTXAKKQVKEKSSVSNNSGSKSKSNSKAIICVLIKLLAGGAAGFRNPGQTIKAITTKILHLHNFCVRDTERRQRHTTPFYFCHFKHRKYMFYYRVH

SEQ ID NO: 32337 - protein, 168 aa, Glycine max
  unsure (1)..(168): unsure at all Xaa locations
  Clone ID: TF_GmC259_1.pep
MSSLGSPKKRLRSQTAEENKEEVVCCGICYAERGVSITGEIDCCSHHFCFVCIMEXGPIFRQRFSYVRWLPMHGVFSSSRDVKVYHPHGNMATGPADSYTETKCGVCHAGTDEHLLLLCDLCDTASHTYCVGLGYTVSDGDWFCHDCAISRETNINEESDQQKFCATC

SEQ ID NO: 32338 - protein, 334 aa, Glycine max
  Clone ID: TF_GmC1473_1.pep
MASSLGRRRTHAPKSSSTLNDDVSCEECGGGHSPSKLLLCDKCDRGYHLFCLRPILPSVPKGSWFCPSCSNHKPKSFPLVQTKIIDFFRIQRSPEALSNQDTRRKRKRGGGLVVSKKKRKLLAFVPSEDPNRRLEQMASLATALTTTKTEFSNQLTYMLGMAPRSANRPALERGGMQVLSKEDTETLNLCKRMMERGEWPPLMVVFDPLEGFTVEADRSIKDLTIITEYVGDVDFLKNRENDDGDSIMTLLSASDPSRTLVICPDKRSNIARFINGINNHTPEGKKKQNLKCVRFDVGGECRVLLIANRDITKGERLYYDYNGDEHEYPTEHFV

SEQ ID NO: 32339 - protein, 256 aa, Glycine max
  Clone ID: TF_GmC727_1.pep
MEAGYNPRTVEEVFRDFKGRRAALIKALTTDVEEFYQQCDPEKENLCLYGFPSEQWEVNLPAEEVPPELPEPALGINFARDGMQEKDWLSLVAVHSDAWLLAVAFYFGARFGFDKADRKRLFNMINDLPTIFEVVTGMAKKQGKEKSSVSNHSSTKSKSNSKRGSESKYTKAMQSKDEDDEGGAGLGLGLEDEDEEEHGDTLCGACGESYAADEFWICCDICEKWFHGKCVKITPARAEHIKQYKCPSCSNKRARP

SEQ ID NO: 32340 - protein, 251 aa, Glycine max
  Clone ID: TF_GmC727_2.pep
MDAGYNPRTVEEVFRDFKGRRAALIKALTTDVEEFYQQCDPEKENLCLYGFPSEHWEVNLPAEEVPPELPEPALGINFARDGMQEKDWLSLVAVHSDAWLLAVAFYFGARFGFDKADRKRLFNMINDLPTIFEVVTGMAKKQGKEKSSVSNHSSTKSKSNSKRGSESKYTKAMQSKDEDDEGVGVEEEDEDEHGETLCGACGESYAADEFWICCDICEKWFHGKCVKITPARAEHIKQYKCPSCSNKRARP

SEQ ID NO: 32341 - protein, 391 aa, Glycine max
  unsure (1)..(391): unsure at all Xaa locations
  Clone ID: TF_GmC86936_1.pep
MATATTNSSPSAQRHVGFSRRTQAPRQLDDDSPPVNKYRLLSEIMARAPYAVLERETYSDLLCDQCGSGELPEELLLCDKCDKGFHMKCVRPIGARVPIGSWLCPNCQGGKRVRTFSHKKITXEYPLQINIKNMMSKHYHIISDWNFFFLIXCSELLDAKKRKKCSRPLVLHKKKRRLLPFVPTKDLNRRLKQMGSLASALTALNMEFSDHLTYLPGMAPRCANQALLENGGMQTLSKEDMETLEQCIALSKRGEFPPFMVVYDSREGYTVEADDLIKDMTIIAEYTGDVDYLDTRERDDCDSMMTLLLGAESSQSLVICADKRGNIARFISGINNHTQEGRKKQNCKCVRYNVNGECRVFLVAIRDISKGERLYYDYNGHEYQYPTHHFV

SEQ ID NO: 32342 - protein, 375 aa, Glycine max
  Clone ID: TF_GmC1161_1.pep
RKYSAKDNDDLCIVCWDGGNLLLCDGCPRAFHKECAALSSIPRGDWYCQFCQNMFQREKFVAHNANAVAAGRVEGVDPIEQIANRCIRIVKDIEADLSSCALCRGVDFSRSGFGPRTIILCDQCEKEYHVGCLRDHKMAYLKELPEGNWLCCNDCTRIHSTLENLLVKGAERLPESLLGVIKKKQEEKGLEPIIDVRWRLLNGKIASPETRPLLLEAVSIFHECFNPIVDAASGRDLIPAMVYGRNVRGQEFGGMYCALLIVNSSVVSAGMLRIFGSDVAELPLVATSNGNHGKGYFQTLFSCIERLLAFLNVKNLVLPAAEEAESIWTDKFGFSKMNPDELTNYRKNCHQMVSFKGTNMLHKMVPSCRVINNQS

SEQ ID NO: 32343 - protein, 576 aa, Glycine max
  Clone ID: TF_GmC6778_1.pep
KYFTCKNCRGCFPSSNVERVGLLCLSCVESRKSEKSSIHAVGKRIRSPRPVLFSRSCSCCASESELCITPQTKKQWKTRTKSSKLSVKLKTAPITSKCLSPQNKSQWRISKRYQRLHKLIFEEDGLPNGAEVAYYARGQKLLEGIKTCSGIVCRCCNTEISPSQFEVHAGWASRRKPYAFIYTSNGVSLHELAIFLSKDHKCTTKQNDYVCVVCWDGGNLLLCDGCPRAFHKECASVSSIPRGEWYCQICQHTFLRERPVLHNADAVAAGRVEGVDPIEQIAKRCIRIVKDIGAEMGGCVLCRSSDFSRSGFGPRTIIICDQCEKEYHVGCLRDHKMAYLKELPEGDWFCCNDCTRIHSTLENLLIRVAERLPESLLDVIKKKQVGRCLEPLNEIDVRWKLLNGKIASPETRPLLLEAVSMFHECFDPIVDPAAGRDLIPAMVYGRNLQTQDFGGMYCALLIVNSSVVSAGMVRIFGRDIAELPLVATRYKNRGKGYFQTLFACIERLLAFLNVKNLVLPAAEEAASIWTEKFGFSKMKPNQLTNYRMNCHQIMAFKGTNMLHKTVPQCRVINTQL

SEQ ID NO: 32344 - protein, 541 aa, Glycine max
  unsure (1)..(541): unsure at all Xaa locations
  Clone ID: TF_GmC1266_1.pep
SSRIGSRKKEKCEDEDNFMDNGTTIGTTTGRKRGQKRRRVLLSDSDYASSGSSDFEFTISEEEREQVREAKRLCGNLRNNLRSSSHPINKKRLESMSINXPQRKPPARKGKEKIEEPLGRKGKEKVEDLKSKGKQTCGICLSEEDKRRVRGVLNCCTHFFCFACIMEWAKVESRCPLCKQRFKTISKPARSTTGIDLREVVIQVPERDQVYQPSEEELRSYIDPYEYVICSECHQGGDDGLMLLCDICDSPAHTYCVGLGREVPEGNWYCDGCRPVALGLQEVQRREGVADPRVSVQSHPVRPPPVLHVRESIDLNLISSPRAAFNQGFGHLPSSRFSGRSAEGASPVSGGAPTLSERRWIHRQIQQLLSIDRMASTPGRTNGISATSSTSNLYSSHFDQSRGTTTLHARTQDVGTSYHTFFDERLCNNSSPLMQNGALWPGLMGTTPVPDCELAHQFSRSNIVPDSGLSPAIREESNFHIAKEQLQSMVKSHLKNLSQNIDLVKYILSSCGHRYCNSYLFSLPSSYGEGRIVATFGTQNT

SEQ ID NO: 32345 - protein, 213 aa, Glycine max
  Clone ID: TF_GmC38836_1.pep
MVYLSPLALSCKSCLREIVIHASANVDEDISIVSEKLATAVKASKVAIVYDPHDICDLELTLAKNFWKIQVNRLLNGLPKPTIQQIQKHLKEGLAMDISPEDHYMLKLTNVNCLGLQWAELAKKVATDSGALSLDKVFELVVVGENLPVDMNEELRILRARCMLYCICRKPFDPERMIACYHCNEWYHFDCMKLPCTEEVYICPACNPCTETC

SEQ ID NO: 32346 - protein, 700 aa, Glycine max
  Clone ID: TF_GmC4485_1.pep
METEGGNGVAEGEVWTLKNGVINSGVAIADGSAAAEDGEVSGSKNEVNGVAFADGNGVTEHGEVWGSKNEAVNNEVAIVDGNGVAYGGEVHGSKNGAVNNEVVIADGNGVTEGQEDHCLKNETVNNVVANADEGNSGAVECFQTYKRRKHAKSSSEFKVQENSRKHMGAASQLLAVRKPFDLAVGNTSKDHSHDHWGNVVLKHLYHSLGNDNGGMKWCIREALMSCPKISCAPTMKETLKIVKDGQECSPQLESLFYRLQSEANGHENVVHNGFSSESNGRDTTEGCQRVFRDILASEKFSSLCKVLLENFQGTKPETVFDFSLINSRMKGQAYEQSPTLFLSDVQQVWRKLQSTGNQIVAMARSLSNMSKASFCEQVGISAQSSFEDEKEVLCNQESISHMKPEQTVECVAFRLGTCWHCGDKADGTDCLVCDSCEEMYHLSCIEPAVKEIPYKSWFCANCTANGIGCRHKNCVVCERLNALKTLDDIVGEENIPTNEETLNELEENSNCTYDGIQISTDRRNSSDCKICKMAVDGEKVKICGHSFCPSKYYHVSCLSSKQLKSYGHCWYCPSCICQVCLTDKDDNKIVLCDACDHAYHVYCMKPPQNSIPKGKWFCIKCEAGIQAIRQARKAYESNKGKVGQNDSKPNEDIDKKWNKKRGRELDNVGGMMDMLITAANTLNSEEDLNAMLIDSKKALT

SEQ ID NO: 32347 - protein, 158 aa, Glycine max
  Clone ID: TF_GmC180828_2.pep
YAMYKRFQAEELLGYGSISDSLTIKFLLGTSGSIQIQGRCPAKHGLSRFRMERGTEVWKVDCICGAKDDDGEKMLACDTCGVWQHTRCAGIDNNTDGMPSKFVCMRCVNSYREETKKLPTPGEEANETCKFTTSCRDEAVARECATVSCNIAVNFGVR

SEQ ID NO: 32348 - protein, 248 aa, Glycine max
  Clone ID: TF_GmC7106_1.pep
MDSGGHYNPRTVEEVFRDFKGRRAGMIKALTTDVEEFYQQCDPEKENLCLYGFPTEQWEVNLPAEEVPPELPEPALGINFARDGMQEKDWLSLVAVHSDAWLQSVAFYFGARFGFDKADRKRLFTMINDLPTIFEVVTGSAKKQTKEKSSENNGNKSKSSSKGRGSEPPKYSKQVKDEEEGLDEEDDDEHGETLCGACGENYASDEFWICCDICEKWFHGKCVKITPARAEHIKHYKCPSCSNKRPRP

SEQ ID NO: 32349 - protein, 217 aa, Glycine max
  Clone ID: TF_LIB4164-036-R1-K1-G5.pep
HASGDVDGNGDECRLCGMDGTLLCCDGCPAVYHSRCIGVMKMHIPEGAWYCPECKINLIGPTIARGTSLKGAEVFGKDLYGQVFMGTCDHLLVLNVKSDDFCLKYYNQNDIPRVLQVLYASEQHRPVYNGICMAMLEYWNISENFLPLCVSKLPPMIEEEHKAVSSVKADYSLTFGNGICDNLVPSLDASLVTTRNPAPGSSGNARTTVNLELHEGN

SEQ ID NO: 32350 - protein, 211 aa, Glycine max
  Clone ID: TF_uC-gmflLIB3275P110a05b1.pep
MAPATTNSSPSAQRHVGFSRRTQAPRQLDGDSPPVKKYRMLSEIMARAPYAVVERETYSDLLCDQCGSGELPEELLLCDKCDKGFHMKCVRPIVVRIPIGSWLCPNCQGGKRVRPFSQKKIIDFFGIRRSSDDANDKRSSQDAKKRKKCSRPLVLHKKKRRLLPFVPTKDLNRRLKQMGSLASALTALNMGISDHLTYLPGMAPRCANQAL

SEQ ID NO: 32351 - protein, 869 aa, Glycine max
  unsure (1)..(869): unsure at all Xaa locations
  Clone ID: TF_GmC1724_1.pep
MDLVPSVKEKLNYFRIKELKDVLTQLHLSKQGKKQDLVDRILSVLSDEQVSKMWAKKNAGGKEQVAKLVDDTYRKMQISGATDLASKGQGASDSSSVKVKSEFDDAFQRDVKIRCLCGSRLETEDLVKCDDPRCHVWQHTRYEIITEKPAKDISDVPDTFXLSSLKYVQYGPACSFPLNNLCSIGRTLXSSKSSVVLTPDFRFRKIVEXVVRHLWSSMKWQLIHNDNGSEASHGGTELQITLCQNACTHPLWQRCCGRNDSLCLISKLSFQKLSIISAKSYYLXVNCLGVRIVKRRSMQQILNSIPKESDGVSNEEALARVCRCVGGGNAADDADSDSDLEVVSDTFTINLRCPMSGSRMKIAGRFKPCIHMGCFDLEVFVEMNQRSRKWQCPICLKNYALENIIIDPYFNRITSMMMNCGEEIAEIEVKPDGSWRVKVKSESERLELGNLAQWRLPDGTLCVSTAGDVKRVDTLKQVKQEGVSDSPAGLKLGIKKNCNGVWEVSKPEGTNTSSGNNLKRVFGNPEQVVIPMSSSATGSGRDGDDPSVNQGGGGHIDYSTTNGIEMDSLCLNNVDLAYEYTAPNTSAQVGGAEVIVLSDSEEDNDLLASPAIAYKNNRNDATDGYSVPPPVIVDSYTEDHNLGGNSCLGLFPNDDEFGMSSLWPLPSGSQAGPGFQLFGSDADVSDALVHLQHGPMNCSSSLNGYALAPNTALGSGSILQESSAGRSDADLNGGLVDNPLAFGGDDPSLQIFLPTRPADSSMHNELRDQASVANGVCTEEDWISLSLGGGAGGNNGDAPTQNGLNSRHQIPTREGAKNTLDDTASLLLGMNDVRSDRARRQRSDSPFSFPRQKRSVRPRLYLSIDSDSE

SEQ ID NO: 32352 - protein, 168 aa, Glycine max
  Clone ID: TF_LIB4164-031-R1-K1-A11.pep
PRVRYCKPCAKLIKSKQYCGICKKIWHHSDGGNWVCCDGCNVWVHAECDKISSKHFKDLENTDYYCPDCKGKFNCESSTSQTYKSKNISLETGPKPALPENLGVVCNGMKGIYIPNDHMIMCKCCLCGSRTHTLTDWERHAGSKARKWRYSVKVESTMQPLKEWIDEH

SEQ ID NO: 32353 - protein, 299 aa, Glycine max
  Clone ID: TF_GmC38836_2.pep
CQLVEKALSCKSCLREIVILASANVDEDISIVSEKLATAVKASKVAIVYDQHDTCDLELTLAKNFWKIQVSRLLNGVPKPTIQQIQKHLKEGQAMDISPEDHYMLKLTNVNCLGLQWAELAKKVATDSWALSLDKVFELVVESENLPVDMNEELRTLRARCMLYCICRKPFDPERMIACYHCNEWYHFDCMKLPCTEDVYICPACNPCTEGLPSNHDRLTSGKFEEPKTPSPRHSNPRKKQKRDVPSLTCNIFASRNQDKLRYSSGIECLRWQNRKPFRRAAKKRVELRSLSPFLCIQR

SEQ ID NO: 32354 - protein, 268 aa, Glycine max
  Clone ID: TF_GmC1740_1.pep
MAIARTGVYVDDYLEYASTLPAELQRLLNTVRELDDRSQSMITQTRQQTKYTMGFSSHGSKKGNHSYNNNYGNEDDDAAIEKMRKEIEVNQDSALSLCTEKVLLARQAYDLIDSHIKRLDEDLNNFAEDLKQEGKIAPDEPAILPPLPIVPKPEKRKPIYVTPQSKRIDYRDRDWDRERDRDFELMPPPGSHKKEYATPMDVDQPIDPNEPTYCVCHQVSFGDMIACDNENCQGGEWFHYSCVGLTQETRFKGKWYCPTCILLPQCQR

SEQ ID NO: 32355 - protein, 139 aa, Glycine max
  unsure (1)..(139): unsure at all Xaa locations
  Clone ID: TF_GmC1740_2.pep
LKQEGKIAPDEPAILPPXPIVPKAEKRKPIYXTPQSKRIDYRERDWDRERDRDFELMPPPGSHKKEYATPMDVDQPIDPNEPTYCVCHQVSFGDMIACDNENCQGGEWFHYSCVGLTQETRFKGKWYCPTCILLPQCQR

SEQ ID NO: 32356 - protein, 179 aa, Glycine max
  Clone ID: TF_GmC180828_1.pep
LPLNATVLDLRSEATSAFQEVYAMYKRFQAEELLGYGSISDSLTIRFLLGTSGSIQIQGKCPAKHGLSRFRMERGTEVWKVDCTCGAKDDDGEKMLACDTCGVWQHTRCAGIDNNTDGMPSKFVCMGCVNLYREETKKLPAPGEEANETCKFNTSCRNEAVARDCATVSCNIAVNFGVG

SEQ ID NO: 32357 - protein, 120 aa, Glycine max
  unsure (1)..(120): unsure at all Xaa locations
  Clone ID: TF_LIB4280-014-R1-N1-B5.pep
MPGMTGYXFLQRIKGSFSFKETPVGIMSFENVFPRINKCLEEGAKDFIVKPVKFFYVKRFKDFMPTKEVRGEFSPKKREGVPKRKLLGPFDGLPLLPPSIFLSPLPFLLRSGIGFPIRRV

SEQ ID NO: 32358 - protein, 135 aa, Glycine max
  unsure (1)..(135): unsure at all Xaa locations
  Clone ID: TF_LIB4164-020-Q1-K1-C11.pep
HASDGIDLVLTEVAMPILSGIGLLCKIMSHKTLKNIPVIMMSSHDSMGIVFKCLSKGAVDFLVKPIRRNELKNLWQHVWRRCHSSSGSGSESATHTRKFAKSKKXDACENNSDSSDENDYGSRNLSVRDGKWHSV

SEQ ID NO: 32359 - protein, 99 aa, Glycine max
  Clone ID: TF_GmC429772_1.pep
HEVIDLQESKSLKDIPVVIMSSENVPARINRCLEEGADEFFLKPVQQSDVNKLRPHLMKSKVKDGEDQQISNKRKETEESHSPDKTRTKMEPQKVVNFS

SEQ ID NO: 32360 - protein, 106 aa, Glycine max
  Clone ID: TF_LIB4165-030-Q1-K1-D7.pep
MAITGEIFRQSIKEMLEESPSGAPELQVLAVDDSLVDRKVIERLLRISSCKVTVVESGTRALQYLGLDGGNSSLGFDSVKVNLIMTDYSMPGMTGYELLKKIKESS

SEQ ID NO: 32361 - protein, 85 aa, Glycine max
  unsure (1)..(85): unsure at all Xaa locations
  Clone ID: TF_LIB3242-109-Q1-J1-E12.pep
RLLGGVVLNSGKAVSDQFRGGFRVLGGDDDPPGLRIFEKMLRPSLYEVPKCXRAKTALSLLRENKNGFDIVISDVHMPDMDGLNF

SEQ ID NO: 32362 - protein, 144 aa, Glycine max
  Clone ID: TF_GmC161_2.pep
GPEFPGLTHGPIITDYCMPGMTGYELLKKIKESSSFKETPVVIMSSENVLPRIDRCLEEGAEDFIVKPVKLSDVKRLKDFMTTKEVIRGELSQEEREGINKRKLLDTSDVSPSSPPSISSSPLPSSPSSVIDSPIRRLKMTGTD

SEQ ID NO: 32363 - protein, 408 aa, Glycine max
  Clone ID: TF_GmC1062_1.pep
LVMEKLLEKLRCRTLTVTNGSEAIRYAMGEVKFDVIMMEFRLPQVNGADVARMIRDTKNANTHTPIVAVTGYLKELQAPHYFDALIEKPPTVAKLTDTLSRLCQWKAPPPGWTPNQVYPSMMPSGLRQESSRQEDSPTTSNSSGYPPVPSASYRGSSREDSISSSFFGDNDSRAGEDMSVRVHNADDWRERDIARAMSGLGISDDAANADHKGAIPNRIGAPDLPHGESAPAVLEEATIRRQRSAEQVGAKRRILETRKHESAESGDDEDDELGHAPVRTRSPKTRPKSTSKLGIEMMRTNSRGSVISVEDVGQADSALPSSPPPMITEDPAAEEHESNLDAPTVAPVLLTPPVMFPEEPGDDVADFVIETPKSHKDATSPDPDPTPKAKSARTPDSEPTGLDSATDT

SEQ ID NO: 32364 - protein, 149 aa, Glycine max
  Clone ID: TF_GmC942_3.pep
MVCTANDLQEWKDFPKGLRVLLLEGDSSSAAEIREQLEAVDYNVSTFYDENEALSALSSSPEGFHVAIVEVSTSCSLGGFKFLENSKDLPTIMTSKDQCLNTMMKCIALGAVEFLSKPLSEDKLKNIWQHVVHKAFNAGANVLSESLKP

SEQ ID NO: 32365 - protein, 75 aa, Glycine max
  Clone ID: TF_jC-gmro02910075c01d1.pep
MDCQMPKMDGYEATKAIRKSEVGTSRHIPIVALTAHAMSCDEAKCLEVGMDAYLTKPIDFKMMVSTILSLTKRTS

SEQ ID NO: 32366 - protein, 92 aa, Glycine max
  Clone ID: TF_GmC103_3.pep
ECLNVIGPAGSSFQVILLDLHMPELDGFEVATRIPKFRSRNWPVIVALTASTDDLWERCMQIGMNGVIRKPVLLHGIASELRRIILQGNSVM

SEQ ID NO: 32367 - protein, 108 aa, Glycine max
  Clone ID: TF_GmC1391_1.pep
INLIITDYCMPGMTGYDLLRKIKESKSLKNIPVVIMSSENVPSRINRCLEEGAEEFFLKPVQQADVNKLKPHLMKSRAKEEQDQPFNNKRKDMEEIHSPNKTRIKCSS

SEQ ID NO: 32368 - protein, 136 aa, Glycine max
  Clone ID: TF_LIB5118-045-A1-PF1-E9.pep
HTLQQRSRQDGQRRITLADALRSARLDGRGVKLGPVAVGEHEDGSAGALEQPVQVVEARRIGRLETEHDGVEQRLTQVGPCVRERRHVQSFERNPRELPQTLDDAIGFAALFGDDENADHSKGGAPLRCCASDSSP

SEQ ID NO: 32369 - protein, 168 aa, Glycine max
  Clone ID: TF_GmC48369_1.pep
MVFSANDLQEWKDFPKGLKVLLLERDNISAAEIRAKLEAMDYNVSTFCEENEALSAISSGLESFHIAIVEVSSSSGQGGFKFLENAKDLPTIMTSNNHCLNTMMKCIALGAVEFLRKPLSEDKLRNIWQHVVHKAFNARASILSESLKPVKESVVSMLQLQTDDEQHE

SEQ ID NO: 32370 - protein, 90 aa, Glycine max
  Clone ID: TF_GmC413_2.pep
LLGSDGCSWIWVLAVTVVESGSRALQYLGLDGEKSSIGLDSVKVNLIMTDYSMPGMTGYELLKKIKESSVFREVPVVVMSSENILTRIDR

SEQ ID NO: 32371 - protein, 173 aa, Glycine max
  unsure (1)..(173): unsure at all Xaa locations
  Clone ID: TF_GmC1752_5.pep
QNQSLTTRNPAGSGLGLAICRRFVNLMEGHIWVESEGLXRTVTKGLLMHLGCDVTTASSSEECLRVVSLEHEVVFMDVCAGLDGYELAXRIHEKFTKHQDRPLIVALTGNTKKVTKENCMRVGMDALILKPVSVDKMRGVLSELLERRVLFQSVYPVRLLYIAISNLEKSPNL

SEQ ID NO: 32372 - protein, 191 aa, Glycine max
  unsure (1)..(191): unsure at all Xaa locations
  Clone ID: TF_jC-gmfl02220070e12a1.pep
GSSSSRIGSRKDSGSGINPLDIPKIFTKFAQNQSLTTRNPAGSGLGLAICRRVVNLMEGHIWVESEGIDKGCTVTFIVKLGIPDRSNEFKLPFVPKVPGNHGSTNFAGLKVLVTDDNGVSRTVTKGLLMHLGCDVTTASSSEECLRVVSLEHEVVFMDVCAGLDGYELAXRIHEKLLNIKIXPLIVALTGN

SEQ ID NO: 32373 - protein, 116 aa, Glycine max
  unsure (1)..(116): unsure at all Xaa locations
  Clone ID: TF_GmC3451_2.pep
RRRRRENSNAELVQWERFLPRMVLRVLLVEADHSTRQIIAALLRKCSYTVIAVPDGLKAWETLKKKASELDLILTEVELPAISGXALLSLIMEHDICKSIPVIMMASHGSVYMAFE

SEQ ID NO: 32374 - protein, 102 aa, Glycine max
  Clone ID: TF_14999708.pep
MELVNSQKLKQHEQQQHFHVLVVDDSVIDRKLLERLLRDSSCKATFVDSGDKALKFLGLLDDDLDNSSSTSSESLQLNGIKVNMIMTDYCMPGMSGYDLLKR

SEQ ID NO: 32375 - protein, 173 aa, Glycine max
  Clone ID: TF_GmC597_3.pep
MQTTQGEQSNNASAVHWERFLPRMVLRVLLVEADDSTRQIIAALLRKCGYKVMSSHDSVSMVFKCMLKGAADFLIKPVRKNELRNLWQHVWRRHAISRPPQNLTLPEIELGFAAENHAASNDSSGSVASTPKDDECSEKTEAHDILQLKSSSNLSNIDTVKHENSTKCERESD

SEQ ID NO: 32376 - protein, 82 aa, Glycine max
  unsure (1)..(82): unsure at all Xaa locations
  Clone ID: TF_LIB3087-003-Q1-K1-B2.pep
MNLSNGKGSTFSSPLKAGDSVSDQFPAGLRVLVVDDDSTRLMILERMLRACVYXVTQCQLAEVALSLXRENNNGFDIVLSDV

SEQ ID NO: 32377 - protein, 222 aa, Glycine max
  Clone ID: TF_GmC161_1.pep
MDSNSVVSWPRMPENINGFGLKQNQSEEVHVLAVDDSTVDRKVIEHLLKVLACKVTAVDSGLRALQLLGLLDEQKIPSETNGFVGLKVDLIITDYCMPGMTGYELLKRIKESSTFKETPVVIMSSENVLPRIDRCLEEGAEDFIVKPVKLSDVKRLKDYMTTKEVRGELSQEEREGINKRKLLDTSDVSPSSPPSISSSPLPSSLSSVIDSPIRRLKMTNTD

SEQ ID NO: 32378 - protein, 611 aa, Glycine max
  Clone ID: TF_GmC1876_1.pep
EFRVGPSLPVAMKKGVDIVLDPCNGSVLRYSRTKGHRGKLKQVLCNLLSNAVKFTEEGHIAVRAWAQKPSLQSSMIATHQYGSSRLLSRLCCRQNEARDDVEDLNIQQDPNCMDFTIEVDDTGKGIPKEKHKSVFENYVQVKETTLGQEGTGLGLGIVQSLVRLMHGDIEIMDKDIGEKGTCFRFNVLLTAHETQMNDDTRDDQVGSGNKNQSHGLTMSPKLSIWTRSPRSEASRVVLLIQNEERRGTTQRFMERLGIKVKVVKEWRQLHYTLKKIIKQKGLHPNSSSSPESSDSPSASSCTNGVPLSAQDGTNYISSIFKRTDIEASSGFVLIVIDANAGPFSELCKVVAEFKRGLCYPCRVVWLENPLIPSVDNKILNKDVSNSNDIVLSKPLHGHRLFQVIRILPEYGGVWPCNSSETKKEKGQVSLTNEGAIRRVELQECGSSSVTQQSYDRSRARKSHIHQGEIQECEESSNEKPLWGMKCLVVEDIVLLRRITKSTLDRLGASVMECENGEQAVQTVEEGLTRNSSNRPCDFILMDCQMPVMDGYEATRRIREIEKSHGVHIPIFALTANTGKEAILSIEAGMDDHLIKPINKEALLKAIKRIYT

SEQ ID NO: 32379 - protein, 739 aa, Glycine max
  unsure (1)..(739): unsure at all Xaa locations
  Clone ID: TF_GmC1752_1.pep
MESCNCIDPQVPADDLLMKYQYISDFFIALAYFSIPLELIYFVKKSAVFPYRWVLVQFGAFIVLCGATHLINLWTFRIHSRTVAVVMTTAKVLTAVVSCATALMLVHIIPDLLSVKTRELFLKNKAAELDREMGLIRTQEETGRHVRMLTHEIRSTLDRHTILKTTLVEXGRTLALEECALWMPTRTGLELQLSYTLRQQNPVGYTVPIHLPVINQVFSSNRAVKISPNCPVARLRPYAGKYMPGAVVAVRVPLLHLSNFQIYDWPEVSTRSYALMVLMLPSDSARQWHVHELELVEVVADQVAVALSHAAILEESMRARDQLIEQNVALDLARREAETAIRARNDFLAVMNHEMRTPMHAVIALSSLLQETDLTAEQRLMVETILKSSNLLATLINDVLDLSRLEDGSLQLEAATFNLHSLFREVLNLIKPVASVKKLSLTSHVASDLPMYAIGDEKRLMQTILNVVGNAVKFSKEGCISITAFVAKPESFRDARIPDFLPVPSDNHFYLRVQVKDSGSGINPQDIPKLFTKFAQNQSLTRNPAGSGLGLAICRRFVNLMEGHIWVESEGIGKGCTVTFIVKLGIPDRSNEFKLPFVPKVPGNHGSTNFAGLKVLVMDDNGVSRTVTKGLLMHLGCDVTTASSSEECLRVVSLEHEVVFMDVCTGLDGYELAVRIHEKFTKHQDRPLIVALTGNTKKVTKENCMRVGMDGLILKPVSVDKMRGVLSELLERRVLFESV

SEQ ID NO: 32380 - protein, 146 aa, Glycine max
  Clone ID: TF_GmC123982_1.pep
MAAGSSSNWVMESGDVPHVLAVDDNLIDRKLVEKLLRNSSCKVTTAENGPRALELLGLTSGGQNTMNGRSKVNMVITDYCMPGMTGYELLKKIKESSVTKEVPVVIMSSENIPTRINKCLEEGAQMFILKPLKQSDVKKLTCQLMN

SEQ ID NO: 32381 - protein, 119 aa, Glycine max
  Clone ID: TF_GmC191_3.pep
MGMAAESQFHVLAVDDSLIDRKLIERLLRTSSYEVTTVDSGSKALEFLGLCENDESNPSTPYVCPNNHQEVEVNLVITDYCMPGMTGYDLLKKIKESSSLRNIPVVIMSSENVPSRINR

SEQ ID NO: 32382 - protein, 132 aa, Glycine max
  Clone ID: TF_GmC690067_1.pep
MAHQNLGTKLTALVVDDNKINRKIHQKLLESVGMKNQGVENGQEAVDIHCHGQRLDLILMDMDMPIMNGIEATKELRSMGIGSMIVGVSSRCTEAEIRKFMEAGLNDYHEKPLNNSKLSSLLDKINPSFTRN

SEQ ID NO: 32383 - protein, 239 aa, Glycine max
  unsure (1)..(239): unsure at all Xaa locations
  Clone ID: TF_GmC1886_1.pep
MYTTPHPPIVYRFWLRDDWSGGHFQYMKHNGRTLKMPKMILLATNISSAEFDKAKATGSTDTVIKKPRRASMVAACLQQVLGMGKKRQLGKDMPNGFLHSLLYGKKILVVDDNGVNRRVAAGALKKFGADVKCAESGKVSXMLQLPHNFDACFMDIQMPEMDGFEATSRIRMMESKANEEMNGSEWHVPILAMTADVILATYDKCVKCGMDGYVSKPFEEENLYQEVAKFFKSKTISDS

SEQ ID NO: 32384 - protein, 114 aa, Glycine max
  unsure (1)..(114): unsure at all Xaa locations
  Clone ID: TF_GmC73999_1.pep
MGVGDRFPVGMRVLAVDDDETCLSVLENLLRKCQYNVTTTNQAIXALEMLRKNRNKFDLXISDVNMPDMDGFKLLELVGLEMDLPVIMLSXYRDKRAGDERCIXGACDYLTNQE

SEQ ID NO: 32385 - protein, 618 aa, Glycine max
  Clone ID: TF_GmC360_1.pep
AVVAVPDGLKAWELLKGRPHNVDLILTEVDLPSISGYALLTLIMEHEICKNIPVIMMSSQDSISTVYKCMLRGAADYLVKPIRKNELRNLWQHVWRRQSSTTGINGLQDESVAQQKVEATAENNAASNRSSGDAACIQRNIELIEKGSDAQSSCTKPDCEAESDPVGNMQEFSLLKCGEAYPSGTETQQVETSFRLGQTLMMHDCHAGGLNVSIRKNGEASTTNDKDTDTEHFGNASISGEAHDNPYVQINSSKEAMDLIGAFHTHPNCSLKNSTVNCTGNFDHSPQLDLSLRRSCPGSFENKLTEERHTLMHSNASAFKRYTTRQLQISMPAVLINFSDQQREQITNCEKNISHIATGSNSDSSTPMQRCIVSPTTVQSKESELATSHPPQGHSLPIPVKGVRFNDLCTAYGSVLPSVFHTQSGPPAMPSPNSVVLLEPNFQVNAFYQSNMKESSSEQLYESRGPNGNTTQNHIVYTQEHKSEHAEDRGHISPTTDQSVSSSFCNGNASHLNSIGYGSNCGSSSNVDQVNTVWAASEGKHKDLTNNANSHRSIQREAALNKFRLKRKERCYEKKVRYESRKKLAEQRPRVKGQFVRQVHPDPLVAEKDGKEYDHSDF

SEQ ID NO: 32386 - protein, 227 aa, Glycine max
  Clone ID: TF_GM342L02.C273.o1.fg.pep
YHNYWELETLREEDDLVIAESLANELSKWNYEVHVVDNFEKIMEDFRRVEPQLVLLDINLPTLNGFHWCQEMRKVSHVPIMFISSRTDNMDQILAIQMGGDDFIEKPFNLSLTVAKIQALLRRTYDLSIARDEIAVKGCKLIVDEAKLSKDNEHVQLSLTELQILKLLFQNENKYVSRTALIEKCWESENFIDDNTLAVNMTRLRKKLLSIGVDDLIETKKNVGYRV

SEQ ID NO: 32387 - protein, 979 aa, Glycine max
  Clone ID: TF_GM459L07rgnA2.C1.o8.ma.pep
MGGGGGGGSKMWHKKWWEKISGQGCKIHQQYYQYIGSKKVKRALWRKLLLTWVVGWFIVSLRIFCYMSSQGTEKRKETLASMCDERARMLQDQFNVSMNHIQAMSILISTFHHAKSPSAIDQKTFAKYTERTAFERPLTSGVAYAVRVLHSEREQFEKQQGWTIKRMDTLEQNPVHKDDYAPEALEPSPVQEEYAPVIFAQDTIAHVISVNVLSGKEDRENVLRARESGKGVLTAPFRLLKTNRLGVILTFAVYKRDLPSNTTPNERIQATDGYLGGVFDVESLVEKLLQQLASKQTVIVHVYDTTNRTHPIAMYGSNESGDFFYHVSTLNFGDPFRKHEMHCRFKQKPPWPWVAITTSIGILVIALLVGYIFHATVNRIAKVEDDYREMMELKKRAEAADVAKSQFLATVSHEIRTPMNGVLGMLHMLMDTDLDVTQQEYVRTAQESGKALVSLINEVLDQAKIEFGKLELEAVLFDIRAILDDVLSLFSEKSQGKRVELAVYVSDHVPELLIGDPGRFRQIITNLMGNSIKFTDKGHIFVTIHLVEEVVRSIEVDKESNSENTLSGSPVADSRRSWEGFKAFSQEGPLGSFSSPSNDLVNLIVSVEDTGEGIPLESQPLIFTPFMQVGSSISRKHGGTGIGLSISKCLVGLMNGEIGFVSIPKIGSTFTFTAVFTNGHRSSSECKIQQINNQPQSASSEFEGMTALIIDPRSVRAEVSGYHIQRLGIHVEMVSDLKQGLSTISNGNVVVNMVLIEQEVWDRDLGLSSHFVNNTRRIDHGVPPKLFILVNSSSSFKASVNLGVHNPTVITKPLRASMLAASLQRAMGVQNKGAPHRELQSLSLRHLLRGRKILIVDDNGVNRAVAAGALKKYGADVVCVSSGKDAISSLKPPHQFDACFMDIQMPEMDGEMEDSVNREVSMDDFENITNWHVPILAMTADVIQATHEECLRCGMDGYVSKPFEAEQLYREVSRFFQSS

SEQ ID NO: 32388 - protein, 228 aa, Glycine max
  Clone ID: TF_jC-gmXLIB3563P009ca05a1.pep
MTALIIDPRSVRAKVSRYHIQRLGIHVEMVSDLKQGLSTISNGNIIINMVLIEQEVWDRDLGLSSHFVNNTRRIDQGVPPKLFILVNSSSSFKASVNLGVHNPIVITKPLRASMLAASLQRAMGVQSLSLRHLLRGRKILIVDDNSVNRAVAAGALKKYGADVVCVSSGKDAISSLKPPHQFDACFMDIQMPEMDGFEATKRVMEMEDSVNRAVSMDDFENITNWHVP

SEQ ID NO: 32389 - protein, 246 aa, Glycine max
  Clone ID: TF_GmC103_1.pep
MSQEGCLLIFLICSSQGPLSANDQYTIYIPGTVKVLVSMLPIFFFSPLILCFACLLCYCQLMQGNIWLVPNAQGFPQVMALFLRFQLRRSIAVSISEPGENSEPSNSNSFFRGLPGCFGLQVLLVENDDVNRAVTQRLLQKLGCVVTPVASGFECLTVIGPAGCSIQVILLDLHMPDLDGFEVATRIRKFRSGNQPMIVALTASAEEDLWERCMQVGINGVIRKPVLLHGIASELRRILMQGNNVL

SEQ ID NO: 32390 - protein, 746 aa, Glycine max
  Clone ID: TF_GmC433_1.pep
VLIADSKELKELNQRLRDGKKIAGGEHGLCEEVKCNGIAEEVKVEQGGTVESSSVQQHIPQPQGAIICWERFLHIRSLKVLLVEIDDSTRHVVTALLRNCSYEVIEAANGLQAWKILEDLTNHIDLVLTEVAMPGLSGIGLLYKIMGHKTRKNIPVVMMSSHDSMGLVFKCLSKGAVDFLVKPIRKNELKNLWQHVWRRCHSSSGSGSESGTQTQKSIKSKSLEKSDNNSGSNDEDDNESIGLNNVDGSDNGSGTQSSWTKRAVEVDSHKPVSQWDQIAECPDSTCAQVVHSNAEMGGNKVVPLAAKDCAEQNEQLVKTAGSQHSNAPDVGPSKFSEQINRGQLDLNCENQSSKLRCKGLSLSDAITSTCDSQMHSGEFEALNKKPKSSDIENKGTNNDEELPSLELSLKRLRGVEDADITIQDDRNVLRRSDQSAFSRYNAASNTKKSPTGCVGSNSPYNNSLEVTKKDSSRDIQSHSCGNPPNQNSNGASNNIDMGSTTNNAYAKSAVMSEPAGASTTKCLYQTSAFQPVKNSLVCTSQQVVLNNTEDMSATILAPPKLDRHKDSAALDFHLHCENHNCIADNMKHQLPPDHDAESIKKMATAAPHCGSSNVEEVLVEGNVGNHSINRSVSGSNNGSNGQNGSSTAVNAGGTNTESNNGLTGNSGSGDASGSGSANRVDQNKTSQREVALTKFRQKRKERRERCFHKKVRYQSRKRLAEQRPRFRGQFVRQTSNENASEATTDS

SEQ ID NO: 32391 - protein, 95 aa, Glycine max
  Clone ID: TF_GmC1886_2.pep
MLAWTWGNHLNRGYTFCRFEATSRIRMMESKANEEMNNGNEWHVPILAMTADVIHATYDKCMKCGMDGYVSKPFEEENLYQEVAKFFKSKTMSDS

SEQ ID NO: 32392 - protein, 120 aa, Glycine max
  unsure (1)..(120): unsure at all Xaa locations
  Clone ID: TF_LIB3109-012-Q1-K1-E5.pep
MLKYIARDKEFRRIPVIMMPAQDEVSIVVKCLRLGAADYLVKPLRTNELLNLWTHMWRRRRMLGLVEKNILNYDFDLVVSDPSDANTXSTTLFSDDTDDKSKRSTNPEAGISVQQEQEST

SEQ ID NO: 32393 - protein, 65 aa, Glycine max
  Clone ID: TF_LIB3242-581-P1-J1-C12.pep
KKYHIPILAMTADVIHATWDECVKCGMDGYVSKPFEEENLYQAVAKFFNPKPTSIQQNARTGKAT

SEQ ID NO: 32394 - protein, 350 aa, Glycine max
  unsure (1)..(350): unsure at all Xaa locations
  Clone ID: TF_GmC3283_9.pep
CRKFRFNNTDFEAHYPAKEELKSKLLNIRDMRNPGFVIVVDIGLLDLSTDIWKEQFNFLHRYFGRAKFVWMLNHDTSNTIKMELRRKGHILMVNKPLYKAKMIHILEAVINERNLELQKKNMIAPRTTMKEGDLHEFLEIDSTHFDGASSDDSDISEISGSNPVSANGDKPVEKLENSHPSSPHHMNNCLVRLTNENECLEEHNLRKEESSSPSSSSATEDNQPKSLSTKESSSISTEDQDEDSECGDTNRVTSSSKAVVDGKKSLEGLKILLAEDTPVLQRVATIMLEKMGADVVAVGDGQQAVDALNCMFTAEDCXENHSRRKETQDHLKQRFSTCRPYDLILMDCQV

SEQ ID NO: 32395 - protein, 235 aa, Glycine max
  Clone ID: TF_GmC46877_1.pep
MEFVDTRKLQLQHQQQLQQQPQHFHVLAVDDSVIDRKLLERLLRGSSCKVTCVDSGDKALKYLGLIDELDDTSSTSLESESSHPPPQPLQREGIKVNLIMTDYCMPGMSGYDLLKRVKGSSWKDVPVVIMSSENVPSRISMCLEEGAEEFLLKPLQLSDLDKLQPYFLKSVDNSCEKESANSSIDSDNDNVINNNSNNSNSNNNNNNSISKRKAMSPEPHREERSRPKMKELAVV

SEQ ID NO: 32396 - protein, 119 aa, Glycine max
  unsure (1)..(119): unsure at all Xaa locations
  Clone ID: TF_LIB3242-407-P1-J1-C7.pep
DDSTRHVVRALLRNCSYEVTAVSNGLQAWKXLEDPENGIDLVLTEVAMPILSGIGLLCKIMSHKTLKNIPVIMMSSHDSMGIVFKCLSKGAVDFLVKPIRRNELKNLWQHVWRRCHSKK

SEQ ID NO: 32397 - protein, 205 aa, Glycine max
  unsure (1)..(205): unsure at all Xaa locations
  Clone ID: TF_GmC413_1.pep
MASAGDLFRHGLPEVGGAGKLHVLAVDDSHVDRKVIERLLKISSCKVTVVESGSRALQYLGLDGDLANSIGLDSVKVNLIMTDXSMPGMTGYELLKKIKESSVFREVPVVVMSSENILTRIDSCLEEGAEEFLLKPVKLSDVKRVTDFIMRGEGMKGVKRSKKRSRSDDCIPSLSTAFSSVSHPCDLSSPPSPCVSQSKKSRLSI

SEQ ID NO: 32398 - protein, 575 aa, Glycine max
  Clone ID: TF_GmC3451_1.pep
MDELNGAMTTENSNAEVVRWERFLPRMVLRVLLVEADHSTRQIIAALLRKCSYTVIAVPDGLKAWETLKKKAPELDLILTEVELPAISGFALLSLIMEHDICKNIPVIMMSSHDSVSMALKCMLKGAVDFLIKPIRKNELRNLWQHVWRRHAISTPTQNTIFSPKKLKTASEDNSASNKSSGSVASSKKNNECSERLSEAQSTCTSPIFEAESTYVENMQDVPQPEQDCGVAEPETENEDEILKSELDGDNSHVSMMQGCSAERVKPSKGAIDLIATFDCETQLELSLRSDFPGSSGNQASEATEESQRLNHSNTSAFSWYSNSKLLQPHFSTPSITFPEVNNLSWDSHESHKLSGITSGNCQYGGSNQNLENMIGTVICQYGQVTPKLSNSQCGLLPVSGVISNLKSEGHGNVFTSLFYAQSGIHPMSSPKPVCQNESSPFPTNHARHDSPVADQSAGNSLCHDAANHVNSSAYGSMDSGNDGNATSAIVSKNAPDGFSDSGCHNYDGFRVTDPHRSSQREAVLVKFRLKRKERCFEKKVRYQSRKRLAEQRPRVKGQFVRQHDHPVAEAGGDS

SEQ ID NO: 32399 - protein, 164 aa, Glycine max
  Clone ID: TF_GmC6773_1.pep
MAITGDIFRQSITEMLAESPSGAPELHVLAVDDSLVDRKVIERLLKISSCKVTVVESGTRALQYLGLEGENGSLGFDSVKVNLIMTDYSMPGMTGYELLKKIKESSVFREIPVVIMSSENVLTRIDRCLEEGAEDFLLKPVKLSDVRRLKDFIMKGKVKEGENI

SEQ ID NO: 32400 - protein, 68 aa, Glycine max
  Clone ID: TF_GmC3283_34.pep
PTRPEATKAIRKSEVGTSRHIPIVALTAHAMSCDEAKCLEVGMDAYLTKPIDFKMMVSTILSLTKRTS

SEQ ID NO: 32401 - protein, 116 aa, Glycine max
  Clone ID: TF_LIB3242-550-P1-J1-E10.pep
VNNGVEAVRAVQRHTYDVILMDVYMPVMNGLQTTKLIRSYEETGNWEAAREAGIEQCSPASNECSVPLKNRIHIIAMTANTMSESADECYANGMDSFVSKPVTFQKLKDCLEQYLR

SEQ ID NO: 32402 - protein, 495 aa, Glycine max
  Clone ID: TF_GmC597_2.pep
VVAFCDGLKAWETLKNKPSDIDLILTEVDLPSISGFSLLTLIMEHDICKNIPVIMMSSHDSVSMVLKCMLKGAADFLIKPVRRNELRNLWQHVWRRHAISRPPQNFTLPEIEIGFAAENHAASNDSSGSVASTAKNGECSEKTSEAQDISQLKRSSNLSNIDTVKHENSTKYIHGCSDELVDPYTGAIDLIATFKNLPKSTDEKCSFSSGNTAKFDFDTQLELSLRRRDFPGSSCKAASEERQLLNHSNASAFSRYSSSKLLQPLFPTPSTISAKLTNSSLSSHESHKFSENASTSHQYGGKNQNQEKIITPVIGQSGQVDPKLPNSQLGYFPATGVTSDHKSTGNGNVFPSMLYAESGVHPIWTPKSVCQKESSPFPTITSSQSNPQSHNSECHLWSEDSTHASDKNLNDQINLDCETHDSPDASQSAGTNSHRTSHREAALTKFRLKRKDRCYEKKVRYQSRKRLAEQRPRVKGQFVRQVQDDHPVADVGGGS

SEQ ID NO: 32403 - protein, 159 aa, Glycine max
  Clone ID: TF_GmC353_2.pep
HASAHASASSQNEYVHIKFDFQITESSQSDKAISTIHYSSRRQYYNNEPKEGLSFSMCKKLVQMMQGNIWISPNSLGLVQGMTLLLKFQIGPSLGKSIFAPKDYSSSQFRGLKVLLAEDDGVNRTVTKKLLEKLGCQVIAVSSGFECLSAISGGWNSFR

SEQ ID NO: 32404 - protein, 128 aa, Glycine max
  Clone ID: TF_GmC62872_1.pep
GLTVRPADDDDVNRTVTKKLLEKLGCQVTAVSSGFECLGAISGSGNSFKIILLDLHMPEMDGFEVARRIRKFQSHNWPLIIAFTASAEEHIKERCLQVGMNGLIRKPILLREIADELGTVLQRAGEKL

SEQ ID NO: 32405 - protein, 148 aa, Glycine max
  Clone ID: TF_6667475.pep
HQGLIFTNGAQAVEVFTRERPQLVLMDALMPVMDGFEAARRIKQLAGEALVPIIFLTSLRESEALAQCLDAGGDDFLPKPYNPLILAAKINAMDRLRRLQATVLRQRDQIARHHDYLLHEQRAAKAVFDKVAHSGCINAAPNIRYLQS

SEQ ID NO: 32406 - protein, 445 aa, Glycine max
  Clone ID: TF_GmC11138_2.pep
MNNNVGKGKKGLAEQNHMFFNKKSLNNGVVNGGVGSGSSTEDDTRFNKVVEDGNNGLRGLIQIHGSLQISQQPPQEPAVCWERFLPLRSIKVLLVEDDDSTRHVVRALLQNCSYKVTAVSNGLQAWKVLEDPENGIDLVLTEVAMPILSGIGLLCKIMSHKTLKNIPVIMMSSHDSMGIVFKCLSKGAVDFLVKPIRRNELKNLWQHVWRRCHSSSGSGSESATLTRKFAKSRSNDAYENNSDSSDENDYGSRGLSIRDGSDNGSGTQSSWTKCLAQVGSPHPVSPHKQLVDAPDSTCAQVMQTKTEKVSSRWVHATEKECHELIDLDDVARVKDLAMGISLNMQLEHPLEELSSNPIVGKGANKMSDVDDMQIIKRKSNVCEKGQLEYNGDKTGTQENQAMNVIDVTDSNSPQAESRDLNTPNGFLVFHNQKQTVAPKSIHPLN

SEQ ID NO: 32407 - protein, 181 aa, Glycine max
  Clone ID: TF_GmC167244_1.pep
MDTDSFVSFDHVSPEDSHEVHVLAVDDSLVDRKVIERLLKISACKVTAVDSGIRALQFLGLDEQRRTSESDGFVPDLKVDLIITDYCMPEMTGYELLKKIKESTMFREIPVVIMSSENILPRIDRCLEEGAEDFIVKPVKLSDVKRLKGYMTPKEVIKMRSQEDRRSDGYVNGGDGGGCGR

SEQ ID NO: 32408 - protein, 219 aa, Glycine max
  Clone ID: TF_GmC31263_1.pep
MNLSHGKGSTSSSPLKAGDTVSDQFPAGLRVLVVDDDPTCLMILERMLRACLYEVTKCKRAEVALSLLRENKNGFDIVLSDVHMPDMDGFKLLEHIGLEMDLPVIMMSADDGKQVVMKGVTHGACDYLIKPVRIEALKNIWQHVVRMRKNGLRDVEQSGSMEEGDRPPKGSDDGNYSSSVNEAQSSKKRRDEDQEGDEKDDYSTLKKPELLVCWLINSY

SEQ ID NO: 32409 - protein, 99 aa, Glycine max
  Clone ID: TF_LIB3242-023-Q1-N1-C10.pep
IICCLLRERGPENKISVVKFGAFCSVIGVFSKQCIILHLGTWFWFNMGVEDRFPVGMRVLAVDDDETCLSVLENLLRKCQYNVTTTNQAIKALDMLRKN

SEQ ID NO: 32410 - protein, 328 aa, Glycine max
  unsure (1)..(328): unsure at all Xaa locations
  Clone ID: TF_GmC142127_1.pep
AITDMKKHNLEDLPSNFRGLKAIVVDGKPVRAAVTRYHLKRLGIQAKVANSINKAVSLCGKNGSLASGYXRLRLQIXQKDSWVCGEEEIFNLWQLDWKQNGHMFKIPQMILLATIQCVATGLETESAYXKIPQIILLATNIGNDEFDKAKAAGFNDTVIMKALRASVVAACLRLLRGTGILGLHGNVVNPRVAAGALRNFGADVTCAESGNAALEMLQLPHNFDACFMDIQMPEMDGFQATQRIRMMETKANEQQMNGEGNGWKDKYHIPILAMTADVIHATYDECVKYGMDGYVSKPFEEENLYQAVAKFFNPKPTTDNSLIENGRT

SEQ ID NO: 32411 - protein, 987 aa, Glycine max
  Clone ID: TF_GmC4331_1.pep
MGGGGGGGSKMWHKKWWEKISGQGCKIHQQYYQYIGSKKVKRALWRKLLLTWVVGWFIVSLRIFCYMSSQGTEKRKETLASMCDERARMLQDQFNVSMNHIQAMSILISTFHHAKSPSAIDQKTFAKYTERTAFERPLTSGVAYAVRVLHSEREQFEKQQGWTIKRMDTLEQNPVHKDDYAPEALEPSPVQEEYAPVIFAQDTIAHVISVNVLSGKEDRENVLRARESGKGVLTAPFRLLKTNRLGVILTFAVYKRDLPSNTTPNERIQATDGYLGGVFDVESLVEKLLQQLASKQTVIVHVYDTTNRTHPIAMYGSNESGDFFYHVSTLNFGDPFRKHEMHCRFKQKPPWPWVAITTSIGILVIALLVGYIFHATVNRIAKVEDDYREMMELKKRAGAADVAKSQFLATVSHEIRTPMNGVLGMLHMLMDTDLDVTQQEYVRTAQESGKALVSLINEVLDQAKIEFGKLELEAVLFDIRAILDDVLSLFSEKSQGKRVELAVYVSDHVPELLIGDPGRFRQIITNLMGNSIKFTDKGHIFVTIHLVEEVVRSIEVDKESNSENTLSGSPVADSRRSWEGFKAFSQEGPLGSFSSPSNDLVNLIVSVEDTGEGIPLESQPLIFTPFMQVGSSISRKHGGTGIGLSISKCLVGLMNGEIGFVSIPKIGSTFTFTAVFTNGHRSSSECKIQQINNQPQSASSEFEGMTALIIDPRSVRAEVSGYHIQRLGIHVEMVSDLKQGLSTISNGNVVVNMVLIEQEVWDRDLGLSSHFVNNTRRIDHGVPPKLFILVNSSSSFKASVNLGVHNPTVITKPLRASMLAASLQRAMGVQNKGAPHRELQSLSLRHLLRGRKILIVDDNGVNRAVAAGALKKYGADVVCVSSGKDAISSLKPPHQFDACFMDIQMPEMDGFEATKRIREMEDSVNREVSMDDFENITNWHVPILAMTADVIQATHEECLRCGMDGYVSKPFEAEQLYREVSRFFQSS

SEQ ID NO: 32412 - protein, 204 aa, Glycine max
  Clone ID: TF_GmC413_3.pep
MASAGDVFRQGLPEVCAAGKLHVLAVDDSHVDRKVIERLLKISSCKVTVVESGSRALQYLGLDGEKSSIGLDSVKVNLIMTDYSMPGMTGYELLKKIKESSVFREVPVVVMSSENILTRIDSCLEEGAEEFLLKPVKLSDVKRVTDFIMRGEGMKGVKISKKRSRSDDCIPSLSTAFSSVSHPCDISSPPSPCVLQPKKSRLSI

SEQ ID NO: 32413 - protein, 198 aa, Glycine max
  Clone ID: TF_GmC478_1.pep
ISREMIELQGGEIGVRSRPGKGATFAFYIAARTADAPPPSVQQSLSSPALMSGRRPSENTRARYSILVVEDNLVNQKILRMQLQKLGHEVHVVSHGREALDFLETTSCWEGGTASHTHVSIILMDIEMPVMNGLECTRRIREAESEGRVKRHLPIIAVSANAREGQVRYAMECGVDDAISKPFRVADLMPIIERLALV

SEQ ID NO: 32414 - protein, 503 aa, Glycine max
  unsure (1)..(503): unsure at all Xaa locations
  Clone ID: TF_GmC353_1.pep
HASAHAPSSGGSVELGAVAAIRMPLLHVSNFKGGTPELVETCYAILVLVLPSSSTRVWTYHEMEIVEVVADQVAVALSHASVLEESQLMRQKLEERNRALQQAKKNAMMASQARKSFQKVMSHGMRRPMHSVLGMLSLFQEDIVXTGQRIRGDTMLKVVNELSIFIDDVMEMSXNEKGGFRLEMKPYLLHSKVKEAASIAKCLCVYEGFGFEIDVQKSLPETVMGDEARTFQVILHMIGYLLNMNDKGTLNFRVFLESDGGDRDDKNIGIWRSSSQNEYVHIKFDFQITESSQSDKAISTIHYSSRRQYYNNEPKEGLSFSMCKKLVQMMQGNIWISPNSLGLVQGMTLLLKFQIGPSLGKSIFAPKDYSSSQFRGLKVLLAEDDGVNRTVTKKLLEKLGCQVIAVSSGFECLSAISGAGNSFRIILLDLHMPEMEGFEVAKRIRKFHSRSWPLIIALIASAEEHVREKCLLAGMNGLIQKPIVLHQIANELRTVLQRAGEKL

SEQ ID NO: 32415 - protein, 204 aa, Glycine max
  Clone ID: TF_GmC413_4.pep
MASAGDLFRHGLPEVGGAGKLHVLAVDDSHVDRKVIERLLKISSCKVTVVESGSRALQYLGLDGEKSSIGFDSVDVNLIMTDYSMPGMTGYELLKKIKESSVFREVPVVVMSSENILTRIDSCLEEGAEEFLLKPVKLSDVKRVTDFIMRGEGMKGVKRSKKRSRSDDCIPSLSTAFASVSHPCDLSSPPSPCVSQSKKSRLSI

SEQ ID NO: 32416 - protein, 249 aa, Glycine max
  unsure (1)..(249): unsure at all Xaa locations
  Clone ID: TF_GmC191_1.pep
MGMAAVESQFHVLAVDDRIIDRILIERLXQPFSIXVTTFDFVHYFLXFSGCHRMMRSISCIPSVLSQQPXTPQEVEVNFVITDYSMPGMTGYDLLMKIKESSSLRNIPVVIMSSENVPSRINRCLEEGAEEFFLKPVRLSDLNKLKPHMKKTKFKDQKQETVERFEDSEVQQQQSQQQIIIQNEHHQAPKLQVLQPESESESHPQPTIEQQQQILQQANNNNKRKTMEQGLSPETDRTRPRYSGIATVV

SEQ ID NO: 32417 - protein, 300 aa, Glycine max
  Clone ID: TF_2407791.pep
GGVGKTTLLIFRNRIGGNAKDRFAIFHLARTLSQFITINHGHIYNQVNTMSNSIRSARSSASRPLPANSTSQPRCDSCSFQIMRLMGFVFQPSVCVASIGAACGSTSVVSMTSCRRWHAIDCFLRSPATAVDMYPTAINSSDHHPTKIRAALATMRGRLHAIPALFPGWTPKYPTRMALPSSLMHRLVHILIGSASPTLPNQPHNFWQKKLPENPNCTYNFNFLKKPAHLGENCPLFESVTNKVKKKKKLAHPGLNGPILKCHPGLGQSASKSISPGLCHFSARHPARPDRTVQIYAPVF

SEQ ID NO: 32418 - protein, 348 aa, Glycine max
  Clone ID: TF_GmC57050_1.pep
MSLVDLMGGEIGFVSEPGIGSTFSFTGTFRKGESTSLDAMQQNNHFGSEFQGLRTLVVDSRKIRAEVTRYHLQRLGMSVDVTYSLNSACSCLSNVCNKSMSTQLAMILIDKDAWDKECHILYTIKKRRQNGIKGDPMNLPKIFLLATHLSSNEQDGLKSVGIIDDILMKPLWLSSLIQCYRVSLGTENKRVNREKVSKLGNLLIDKQILVVDDNAVNRRVAHRVLQKYGAKVTAVESGRAALKMLELPHNFDACFMDLQMPEMDRFEATRKIRCLESEVMEKIACGQASAEMFGNISYWHIPILAMTADSTQSSNEECIKCGMNDYVSKPFEEEQLYMAMARFFKSDS

SEQ ID NO: 32419 - protein, 157 aa, Glycine max
  unsure (1)..(157): unsure at all Xaa locations
  Clone ID: TF_GmC663_2.pep
MEKVAPPPILMHRKRDLSYDIVSAGPNESWRWEWDSVRFAGKPPPPPPLSPNNDVVFEAESVVPPLQLKLGGTTRVNNNNININVSNKRVRSGSPGTASYPMCQVDNCREDLSKAKDYHRRXKVCEAHSXASKALLANQMQRFCXQCSRFHPLSSSM

SEQ ID NO: 32420 - protein, 59 aa, Glycine max
  Clone ID: TF_LIB3093-052-Q1-K1-H5.pep
FPCLVHSLQSTRFCNADLSKSNDYHILHKVGDIHSKGIISLVLNSILTFFQQFNMFHLL

SEQ ID NO: 32421 - protein, 53 aa, Glycine max
  Clone ID: TF_14126564.pep
IRFHLLVEFDDGKRSCRRRLAGHNERRRKPQFDYMTGKQHKILQSYQGMKNAF

SEQ ID NO: 32422 - protein, 152 aa, Glycine max
  Clone ID: TF_LIB4391-031-Q1-K1-E6.pep
GYHRRHRVCLRCANAATVMLNGEAKRYCQQCGKFHVLSDFDEGKRSCRRKLERHNTRRRRKPTADSGGATHSELLQPVAENEENNYDVEAGKECSLADTDINDVGVSLDLEDEPAPIPSSAPEAQNINSDSVVSLAVSGETRVNSGNTSNSP

SEQ ID NO: 32423 - protein, 114 aa, Glycine max
  Clone ID: TF_GmC138175_1.pep
MDGSWSEGKRSMSYKEEDEYEEEEEEEVSEYGDDGKKKRVVSNKRGSKAGGSVPPSCQVDGCNADLSEAKPYHRRHKVCEYHAKAPAVVIGDQHQRFCQQCSKVHELSEYDDSR

SEQ ID NO: 32424 - protein, 785 aa, Glycine max
  unsure (1)..(785): unsure at all Xaa locations
  Clone ID: TF_GmC4383_1.pep
MEPLSLPPLPVMDDAEDPSSIWDFSYLLDFDLDDQDIIINNNNSLPLPFNDHPAPNEIPQNDRVRKRDPRLTCSNFLAGRVPCACPELDAILEDEGLPGKKRARTARASASARCQVPACEVDISELKGYHRRHRVCLRCANAATVMLNGEAKRYCQQCGKFHVLSDFDEGKRSCRMKLERHNTRGGRKPTTYSGGATHRQLLKRDIINSEEELPERYGRRCLGRGFLTSRPAIFVIVSDAVCLGVCVADLHPGRVSELAVSVRRCLFNYXYFLHLSSSWYIFDVTLNKSYCEDIIRLREDDRRGRISFKLYDWNPAEFPRRLRHQIFQWLASMPVELEGYIRPGCTILTIFIAMPNIMWINLLKDPLEYVHDIVAPGKMLSGRGTALVHLNDMIFRVMKDGTSVTNVKVNMHAPKLHYVHPTYFEAGKPMEFVACGSNLLQPKFRLLVSFSGKYLKCEYCVPSPHSWTEDNISCAFDNQLYKIYVPHTEESLFGPAFIEVENESGLSNFIPVLIGDKKICTEMKTLQQKLDVSLLSKQFRSASGGSICSSCETFALSHTSSSDLLVDIAWLLKDTTSENFDRVMTASQIQRYCHLLDFLICNDSTIILGKILPNLIILTESMKSNVVINRTSDVDIMQLLNHIHNARNAVYQKHPKSESIIVHSEMKGFILAQGCSQDNKLSVAINSQGIQSRADEKWGVLKVKSPTSNEKMERIPLLKRDIIMSMEELPERYGRRCLGRGFLTFRPAIFVLVSVAVCLGVCVAVLHPGRVSELAVSVRRCLFNY

SEQ ID NO: 32425 - protein, 229 aa, Glycine max
  unsure (1)..(229): unsure at all Xaa locations
  Clone ID: TF_GmC261392_1.pep
MDWDGKEFAWDPRGLELANGEGQKSEAASVDLRLGEEKTAPDVVAKDTKDSKTVSSPSGSSKRSRLQNGLQNMCCSVDGCNSDLSDCREYHRRHRVCEKHSKTPVVMVGGKQQRFCQQCSRYGSLGEYVGVKSFCMRLCDSQLFRXLDVFCDMGWCQLLLLCRFHSLGEFDEVKRSCRKRLDGHNRRRRKPQPPSLFMAAEKFMYNYKGRFASSWFFFCLLLLNWISIV

SEQ ID NO: 32426 - protein, 125 aa, Glycine max
  Clone ID: TF_GmC860438_1.pep
HICGVVNADLHEAKQYHRRHRVCEYHVKAQVVLVDEVRQRFCQQCSRFHELAEFDDTKRSCRSSLAGHNERRRKNSDQSQAEGSSRNKGTGHPQLKDITCGQADERGRIQITIHENAAYKHFQIR

SEQ ID NO: 32427 - protein, 181 aa, Glycine max
  Clone ID: TF_GmC735929_1.pep
VEGCHVALVNAKEYHRRHRVCDKHSKAPKAVVLGLEQRFCQQCSRFHVVSEFDDSKRSCRRRLAGHNERRRKSSHLSVTRNSRQGCALSLLSSGSSSENWLSHHADFSTRCSAALRELIAENRAALITRQQQLVYDRDWPHVVPHHDAAVEEEEEDFEDLQQQQQPPEPNYFPQQHMFPQT

SEQ ID NO: 32428 - protein, 440 aa, Glycine max
  unsure (1)..(440): unsure at all Xaa locations
  Clone ID: TF_GmC7371_1.pep
MGGKSSKGSGRRYDFGASSSSRDNSYGGYPPQSPYTSYQTPQHPCASASASAPFYDYAQPKRKLDKKYSRIADNYRSLDEVTAALANAGLESSNLIVGIDFTKSNEWTGKRSFNRKSLHDIRSGQNPYEQAISIIGKTLSAFDEDNLIPCFGFGDASTHDQDVFSFYSEERFCNGFEEVLTRYRQIIPSLKLAGPTSFAPIIEMAMTIVEQSGGQYHVLLIIADGQVTRSVDTQNGNLSPYQMDXQEQNTKDNSLDAISAXQSIVLVGVGXWEMMREFDDNIPSRAFDNFQFVNFTEIMTRNVDSTRKETDFALSALMEIPSQYKATLELGILGSRRGHSPDRVALPPPLYSRTSSSISTKSTRSNSFQQRTPTHTSYDSSVHTETSSSSLYDNKVCPICLTNAKDMAFGCGHQTCCECGEDLQFCPICRSTIHTRIRLY

SEQ ID NO: 32429 - protein, 175 aa, Glycine max
  Clone ID: TF_GmC263455_1.pep
GLTAVTVPRCQVEGCHLALLNAKDYHRRHKVCEMHSKAPKVVVLGMEQRFCQQCSRFHVVSEFDNSKRSCRRRLAGHNERRRKSSHDSVARNSSKGGCALSLLSSRSDSWLSPSDLSIRCSAALRELIAENRAAIMARQFVSDRDWHNHHHAVEDFKEIQPESNYFPQQMFPQTQ

SEQ ID NO: 32430 - protein, 808 aa, Glycine max
  Clone ID: TF_GmC365_1.pep
MTASTSSRAVCQVEDCRADLSNAKDYHRRHKVCDMHSKATQELVGNVMQRFCQQCSRFHVLQEFDEGKRSCRRRLAGHNKRRRKTLPDATVVNGGSLNEEKGSSYLLMSLLRILSNMHSNGSDNMRNQDVLSHLLRNLASLTGTINGRNIVSLLEGSQDLVKAGTSGAAQNVPNTNSDGPEPSRPLDSSIKMDDGLIHRDPPESMVQRETTPANDMAKKCIASGSDGVGSLKSPSVPQSSNVLLSRDGLPPQSVAAQTTVGRIGIMLRTRGILVLLCLQGMGLLIILNWLSHSPTEIESYIRPGCIILTIYLRLENSAWEELCYNLESSLRKLAAPNDSFWRTGWIYTRVQHSVAFLYNGQVVLDAPLRLKSPQSCQILCVKPLAVSASSCAQFVLKGFNFLLSNSRLLCALEGKYLVQDSCYDLIDSADAVNGHQELQHLSFSCHVPNVTGRGFIEVEDNGLSSCSFPFIVAEQEICLEICKLENVIEAAETADDNQIKTNLMEEKTQALYFIQEMGWLLHRSRVKVRLGPMAPVQDRFHFNRFIWLVGFSMDHDWCAVMKKLLNIIFEGTVDTGDHASVELALLEMGLLHKAVKRNCRPMVEILLKFVPKQVNKSPDRFIFRPDTVGPVGLTPLHVAASMHGSENVLDALTDDPGMVGTEAWKSAQDATGLTPYDYASMRGYYSYIQLVQSKTSNTCKSQHVLDIPGTLVDSNTKQKQSDRHRSSKVSSLQTEKIETTAMPRRCGLCQQKLAYGGMRRALVYRPAMLSMVAIAAVCVCVALLFKSSPKVYYVFQPFSWESLEYGSI

SEQ ID NO: 32431 - protein, 142 aa, Glycine max
  Clone ID: TF_GmC368_1.pep
MDTSRSEGKRVMRYKEEDDDNDDEEEEEVVSEMGFEEDGRRNKRVIRDLYGKRGSKGGGSITPSCQVDNCDADLSEAKQYHRRHKVCEYHAKAPSVHMAGLQQRFCQQCSRFHVLSEFDDSKRSCRTRLAGHNERRRKYAVD

SEQ ID NO: 32432 - protein, 185 aa, Glycine max
  Clone ID: TF_GmC47481_1.pep
MERERALFERVRKNSTVEEEVENEVEEEDESGVSITEEEKKKGVGSSGGRRGSSGGSGGVSPPSCQAERCGADLTDAKRYHRRHKVCEFHSKAPVVVVAGLRQRFCQQCSRFHDLAEFDESKRSCRRRLAGHNERRRKSNPEASNEGSTKGHHPKETTHCRLANERERIQMNLPGSSGYKSFNIR

SEQ ID NO: 32433 - protein, 133 aa, Glycine max
  Clone ID: TF_GmC39396_2.pep
MASDAKLSSSESLNGLKFGQKIYFEDVGLATPATSLTSSSSSSSAATVTSSSSSRKGRGGSVQPAQPPRCQVEGCKVDLSDAKAYYSRHKVCGMHSKSPSVIVAGLQQRFCQQCSRFHQLPEFDQGKRSCRRR

SEQ ID NO: 32434 - protein, 85 aa, Glycine max
  Clone ID: TF_GmC60889_1.pep
MVMVYSAAVMFSLLSRFHLLAEFDDGKRSCRKRLAGHNERRRKPQVGIHSGKAGRLLQPYAGNYLFLKLCYDKASLLSSILLGST

SEQ ID NO: 32435 - protein, 187 aa, Glycine max
  unsure (1)..(187): unsure at all Xaa locations
  Clone ID: TF_GmC39396_1.pep
MASDAKLSSSESLNGLKFGQKIYFEDVGFATPATSLTSSATTATTVTSSSSSSSRKGRGGSVQPAQPPRCQVEGCEVDLSNAKTYYSRHKVCGMHSKSPTVIVXAGLQQRFCQQCSRFHQLPEFDQGKRSCRRRLAGHNERRRKPPPSSLLTSRYARLSSSAFDHSGRGGNFLMELASYPKLSLRNS

SEQ ID NO: 32436 - protein, 280 aa, Glycine max
  unsure (1)..(280): unsure at all Xaa locations
  Clone ID: TF_GmC38724_1.pep
MGSASVTKAPPSSSSSPNSSSTESLDGLKFGQKIYFEEVSVAAAAATTTQGGNKTRGGVSASKKGRGGSVQAPRCQVAGCKVDLSGAKAYYSRHKVCAMHSKSPTVTVAGLEQRFCQQCSRFHLLSEFDQGKRSCRKRLAGHNERRRKPPPSSILTSRYGRLSXPIFDNNGRDDGFLMEFASYPKLTLRNTLPTQRSTEPAPGNHAATLTWQGGSDTPSEFFLQGSGSSGGTSFLNSKHPLVESYTGVTDSNCALSLLSSQTLGFRNTAPATKFELNNNL

SEQ ID NO: 32437 - protein, 70 aa, Glycine max
  unsure (1)..(70): unsure at all Xaa locations
  Clone ID: TF_GmC261392_2.pep
PQIVAKDTKESKTVSSPSGSSKRSRLQNGSQNMCCSVDGCNSDLSDCRDYHRRHRVCEKHSXTPXVLVGG

SEQ ID NO: 32438 - protein, 986 aa, Glycine max
  Clone ID: TF_GmC564_1.pep
MEAEFGAKNQYLYGPVVSGMKKAVVGNGKRSLEWDLNDWRWDGDLFTAQPLNSVPSDCRGRQFSPPHPEIPAKNANPSTTNLSYSVFISGEGKRELEKRRRGVIGEGEGEGLNYEAGSLSLNLAGQGYPLMVEEEEKSGKKTKVIGTNTTTTTTTTSNRAVCQVQDCRADLSNAKDYHRRHKVCDVHSKATMALVGNVMQRFCQQCSRFHVLQEFDEGKRSCRRRLAGHNRRRRKTHPDVSVVNEGSLNDQRDSNYLLMSLLRILTNLHSNGSDHTRNQDILSHLLKNLASLAGPNNGGRLAPLLEESKGLVNAGTHGADHDKPNLNSNAPEASRPSSSIKTDNGIIAQDPPMSVVQGNLNNIDLNNVYNDIQNTVENHKKPYPPVASGMGFIDHASWLQCDSLKSSPPQTSRNSDSTSTQSPSSSSGEAQSRTDRIVFKLFGKDPSDFPLLLRSQILNWLSHSPTEIESYIRPGCIILTIYLRLEKSAWEELYCNLGSSLRKLLAASNDSFWRTGWVYARVQHAVAFLYNGQVVLDVPLRLKSPQHCMISCINPLAVPASASAQFIVKGFNLSQSSTRLHCALEGKYLVHASCHDLIGGADAPIQHLSFSCQIPSVTGRGYTTDGDHGLSSCSFPFIVAEQEVCSEICKLENVIEEAETTDDIQIKNQHMEEKTQALDFLQEMGWLLHRSHVKFKLGSMAPFHDLFQFNRFAWLVDFSMDHGWCAVMKKLLDIIFEGGVDAGEHASIELALLNMGLLHRAVKRNCRPMVELLLRFVPVKTSDGADSEMKQVAEAPDRFLFRPDTVGPAGLTPLHVAASMSGSENVLDALTNDPRMVGIEAWKSARDSTGLTPNDHACLRGYYSYIQLVQNKTNKKGERQHLVDIPGTVVDSNTTQKQSDGNRTCRVPSLKTEKIETTAMPRQCRACQQKVAYGGMKTAMVYRPVMLSMVTIAVVCVCVALLFKSSPRVYYVFQPFNWESLEYGAM

SEQ ID NO: 32439 - protein, 88 aa, Glycine max
  unsure (1)..(88): unsure at all Xaa locations
  Clone ID: TF_700734849H1.pep
AHPYTVACLVDGCNSDLSNXRDYXHRRHKVCELHSXTPEVTIGGFKQRFCQQCSRFHSLEQFDERKRSCRKRLDGHNRRRRXPQPEPL

SEQ ID NO: 32440 - protein, 81 aa, Glycine max
  Clone ID: TF_LIB4390-055-R1-K2-H7.pep
KELVLLYFFSSRFHLLSEFDNGKRSCRKRLADHNRRRRKTQQIAQEIHKSQHSLDNVARSLPESGAQSSSSSGKVAVRVTP

SEQ ID NO: 32441 - protein, 339 aa, Glycine max
  unsure (1)..(339): unsure at all Xaa locations
  Clone ID: TF_GmC422_1.pep
MLDYEWGNPSTIMLTGNEDSSAAGSDQTHRQIFDHYASXHTHPRPLPTRANALHRHHRRRNHRGFHPSTTSPRNPTTIXHMNHHHHTMPSSTHALXHGASNTSYPPPPSMLSLDPLPHVNAVGSGPGHGPGPGPGPGGLLLVPKSEEVGRPMDFVGSRIGLNLGGRTYFSSSEDDFVSRLYRRSRPVEPGSTISSNSPRCQAEGCNADLSQAKHYHRRHKVCEFHSKAATVIAAGLTQRFCQQCSRFHLLSEFDNGKRSCRKRLADHNRRRRKTQQPTQEIQKSQPSLDNVARSPPDSGAQSSSSVTVAVSPPDYFRQRPYQSTNNPSSISSSLFFSSG

SEQ ID NO: 32442 - protein, 211 aa, Glycine max
  Clone ID: TF_GmC663_1.pep
MDQVAPPPILMHRKRDLSYAVVSPAPNPSWSWDWDSVRFAGKPPPPLSSPNDDVVFEESVAPPLQLNLGGRTNNSNSNKRVRSGSPGTSSYPMCQVDNCREDLSKAKDYHRRHKVCEAHSKASKALLANQMQRFCQQCSRFHPLSEFDEGKRSCRRRLAGHNRRRRKTQPEDVTSATPAPAAAANLEIFDLLTAIAGASQGKFEEKRSQVP

SEQ ID NO: 32443 - protein, 291 aa, Glycine max
  unsure (1)..(291): unsure at all Xaa locations
  Clone ID: TF_GmC95509_1.pep
MECNAKSLGQWDWEHLFFFNTKAAENPRLQPTDCSSEADREINVGMLYPSGGSACSGSELIHASSSRSSKSASNNSSSNGDSRESILTLEGSHDDSTGKKELCNGEPVETSPAAVPSPVSGEPLLTLKLGRRLYFEDVCTASDSKKPSSFEVPILSGKKYKTSSQAVQHPSCQVEGCGLDLSSAKDHHRKHRVCEAHSKSPKVVITGLERRFCQQCSRFHCXLSEFDDKKRSCRQHHFATNSSRSKSQPDSILLNPSALSTSPYDGRQIVNTFAFSRTPIDLAWQDMNPQT

SEQ ID NO: 32444 - protein, 187 aa, Glycine max
  Clone ID: TF_GmC325872_1.pep
MEIKSRERIQVSIEKVRRDSTVEVEDEEEEDESVVGGEGGLAEDEKKKGGGGSGRRGSSGFFPPSCQAEMCGADLTVAKRYHRRHKVCELHSKAPSVMVAGLRQRFCQQCSRFQELAEFDEAKRSCRRRLARHNERRRKSNAETCNEGCSGSKGQHPTESHCRNADVWGRIQMNIAKNSGYNSFHIR

SEQ ID NO: 32445 - protein, 393 aa, Glycine max
  unsure (1)..(393): unsure at all Xaa locations
  Clone ID: TF_GmC53350_1.pep
MDWNLRCEKTTEGEVDQANLPNMETMEGSSRYGMYRTKGEFSVDLKLGQVGNSGRESSVLTKSKDGGAVGVSKMISSSSSGSAKRARSLSNGTQTVSCLVDGCHSDLSNCRDYHRRHKVCEVHSKTAQVTIGGQKQRFCQQCSRFHSLEEFDEGKRRNSKKIIIFSFHDLQXYQHTRKSMTKFSSNFXGTQLLPFSSSHEYPSTTVVNPTWGGVLTTSGDVRLHGHNQHHHQVHLADKQDLFLGSSPAGYKEGKQLAFMQGDHTLNNRSPHLPGASVGQAQMFLRTSLYSESDGLRCKMFCDSLTSSIQDNNTSRALSLLSSPPQPLSPGNGLNLMVNSHSPLMQPLGLSLHDNSLGSVDPVLGPNDSSSMYNIGSNGSQGNEAPPLFPFQWE

SEQ ID NO: 32446 - protein, 182 aa, Glycine max
  Clone ID: TF_GmC7371_4.pep
GVWGKRSSEWDLNDWRWDGDLFIASRLNPVPADGVGVGQQFFPIGSAGIPVAGGPSNSSSTSEEVDPRDPKGNKEGDKKRRVIVLEDDGLNEEGGTLSLKLGGHASAVVDREVGSWDGTNGKKSRVSGSTSNRAVCQVEDCSADLSKAKDYHRRHKVCEMHSKASRALVGNAMQRFCQQCSR

SEQ ID NO: 32447 - protein, 77 aa, Glycine max
  Clone ID: TF_jC-gmXLIB3564P117ae07a1.pep
MVEEEEKSGKKTKVIGAPTASTTPASNRAVCQVQDCRADLSNAKDYPRRHKVCDIHSKAPMALVGNVMQRFCQQCSR

SEQ ID NO: 32448 - protein, 146 aa, Glycine max
  Clone ID: TF_GmC130710_1.pep
ALVINCHMMLHYIPDETLSDTTGLTSFLYDSSSLAASSAVSVTPTSSLRSLFLKSLRGLDPTVVILVDEDADLTSNNLVCRLRSAFNYLWIPYDTVDTFLPRGSKQRQWYEADICWKIENVIAHEGVQRVERVEPKNRWEQRMKNA

SEQ ID NO: 32449 - protein, 157 aa, Glycine max
  Clone ID: TF_uC-gmrominsoy069c09b1.pep
MLQFKRGLEEASKFLPRRPQLFTGLESTAVSAEPKGKGVALKMENSIGVRSRKNHARQDEEEEEERSNKQSAVSAVCVEEESEISEIFDRVLLSVENVPLCAEKNGSVAQAEKSNLSDGGKVRSKRQGRKKETVDLRTLLIMCAQAVSFSDNRTANE

SEQ ID NO: 32450 - protein, 132 aa, Glycine max
  Clone ID: TF_15203660.pep
MTVKGSGKNEERELLQKMDTNIALKCHLKVPFNQVMQFTGIQAIVEHVACETKIHLIDLEIRSGVQYTALMQALAERRDRIVQLLKITAIGLSSLKTMIEETGKRLASFAESLNLPFSYKTVFVTDIAEIRE

SEQ ID NO: 32451 - protein, 145 aa, Glycine max
  unsure (1)..(145): unsure at all Xaa locations
  Clone ID: TF_LIB3092-002-Q1-K1-C1.pep
PTRPEKKVHIIDFDISQGTQYITLIQTLASMPGRPPRVRLTVVDDPESVQRSIGGINIIGQRLEKLAEELRLPFEFRAVASRTSIVSPSMLNCRPGEALVVNFAFQLHHMRDETVSTVNERDQLLRNVKSLNXKIGTVVEQDMNT

SEQ ID NO: 32452 - protein, 74 aa, Glycine max
  Clone ID: TF_LIB3242-464-P1-K1-D8.pep
CEGAKRVERHELLKKWRSRFTMAGFTPYPLNSFVTCSIKNLQQSYQGHYTLEERDGALCLGWMNQVLITSCAWR

SEQ ID NO: 32453 - protein, 112 aa, Glycine max
  Clone ID: TF_jC-gmst02400046a06a1.pep
QKATENNNLAVAEALVKQIGFLALSQVGAMRKVATYFAEALARRIYRVFPQQHSLSDSLQIHFYETCAYLKFAHFTANQAILEAFQGKNRVHVIDFGINQGMQWPALMQALA

SEQ ID NO: 32454 - protein, 201 aa, Glycine max
  Clone ID: TF_LIB5118-051-A1-PF1-F2.pep
FLVLKFTPLLQSLGEVIDVSMLHVKPGEAVAVHWLQHSLYDATGPDWKTLKLLEELEPRIITLVEQDVNHGGSFLDRFVASLHYYSTLFDSLGAYLHNDDSNRHRVEHGLLSREINNVLAIGGPKRSGEDNFRQWRSELARHCFVKQVPLSDNSMAQAQLILNMFSPAYGYSLAQVEGTLRLGWKDTSLYTASAWTCCNSS

SEQ ID NO: 32455 - protein, 271 aa, Glycine max
  Clone ID: TF_GmC121075_1.pep
MDTTLFRVVSSFQHQHQPDHDQSLNNSTTSSSSRSSRQQQNYPYPQEDEECFNFFMDEEDLSSSSSKHYCPYQPHPPSTTTIHHSFSPTPCDFEFSGKWAQDILLETARAVADKNTTRLQQLMWMLNELSSPYGDTDQKLASYFLQAFFSRISQAGDRTYRTLASASEKTCSFESTRKTVLKFQEVSPWTTFGHVASNGAILEALEGEPKLHIIDISNTYCTQWPTLFEALATRNDDTPHLRLTSVVTADATAQKLMKEIGARMEKFARLM

SEQ ID NO: 32456 - protein, 99 aa, Glycine max
  Clone ID: TF_LIB5068-031-A1-XP1-G9.pep
ESMHTCHSHIIASLTYFLCSNAFDIFLYSKRICIDLICLPMFVPKTEFEHLRKTQALRSFSYASLMFRKTGPLWFTSCSTIVTPLGFNFLTVSTDQFIN

SEQ ID NO: 32457 - protein, 203 aa, Glycine max
  unsure (1)..(203): unsure at all Xaa locations
  Clone ID: TF_LIB4281-013-R1-K1-H3.pep
HASGPYFKFGYMSANGAIAEALKEEIEXHIVDFQIGQGTQWVSLIQALAHRPGGPPKIRISGVDDSYSAYARGGGLDIVGKRLSAHAQSCHVPLXFNAVRVPASQVQLEDLELLPYEXLXAVNFAISLHHVPDXSVNSHNHRDRLLRLAKRLSPKVVTLAEQEFNTNNAPFLQRFDETMKYYLAGFESIDTVLPGDXXXRLMW

SEQ ID NO: 32458 - protein, 288 aa, Glycine max
  Clone ID: TF_GmC30861_1.pep
MQASEQHRNSSMYYQPLQQIEAYCLPQYRTLNPQLYYHDGGHGTQFSTPSSSELYCTLESSSVALYNSPSTVSFSPNGSPISQQDSQSYPPDQYHSPENTYGSPMSGSCITDDLSSFNLKHKLRELESVMLGPDSDNLDSYDSAISNGNNFVPLEMDGWKQTMVAISSKNLKHILIACAKAISDNDLLMAQWLMDELRQMVSVSGDPFQRLGAYMLEGLVARLAASGSSIYKSLRCKEPESAELLSYMHILYEVCPYFKFGYMSANGAIADAMKDEDRVHIIDFQIGQ

SEQ ID NO: 32459 - protein, 163 aa, Glycine max
  Clone ID: TF_jC-gmfl02220090c02d1.pep
ARGGEEDGCADGVRLVQLLIACAEAVACRDKSHASILLSELKANALVFGSSFQRVASCFVQGLIERLNLIQPIGPAGPMMPSMMNIMDVASDEMEEAFRLVYELCPHIQFGHYLANSTILEAFEGESFVHVVDLGMSLGLRHGHQWRGLIQNLAGRVSGERVR

SEQ ID NO: 32460 - protein, 198 aa, Glycine max
  Clone ID: TF_GmC890_1.pep
VKEHETVAVNCVLQLHKTLYDGSGGALRDFLGLIRSTNPSVVVVAEQEAEHNENRLEGRVCNSLKYYSALFDSIDESGLPQESAVRVKIEEMYAKEIRNIVACEGRERVERHESFGNWRRMMVEQGGFRCMGVTERELSQSQMLLKMYSCESYSVKKQEKEGATGVTLSWLEQPLYTVSAWGPVDAAAGTSSSFSQPS

SEQ ID NO: 32461 - protein, 111 aa, Glycine max
  Clone ID: TF_LIB3139-046-P1-N1-E1.pep
MASPRCPPRENTKPQEFKLHTQERAVKRAMCGSEVELENLVIQPGEALVVNFPFVLHHMPDESVSTENHRDRLLRLVKSLSPKVVTLVEQESNTNTSPFFQRFAETLSYYT

SEQ ID NO: 32462 - protein, 198 aa, Glycine max
  Clone ID: TF_GmC151_1.pep
SAIASRNWETIQIEDLKIERNELLAVNCLVRFKNLLDESIEVNSPRNAVLNLIRKMKPDIFVHSVVNGSYNAPFFLTRFREALFHYSSIYDMFDTLISRENEWRLMLEREFLGREIMNVVACEALERVERPETYKQWQARNTRAGFKQLPLDKEIMTKFRGKLREWYHRDFVFDEDGNWMLQGWKGRIILYASTCWVP

SEQ ID NO: 32463 - protein, 568 aa, Glycine max
  Clone ID: TF_GmC374_1.pep
MDLNQFLNFNVISSEGFPCTSSCTPISPISNQLLGSLKLDIGNSPNSALSSHFDSDTLSSALSDSQELHTSGEIHSGVNSCKSLQESNHYLHRPVSFVDHLQDGLHLSTRSFLPQDASYDHETRHALLELETALMAPDGEDQITTSSTSLGVGSRPTTSCQRNRSWSSEGQSSDVAHVEKHHKSVEEESLQGFPSCNLKQLLIVCAKALSENNMQHFDQLIEKARSAVSITGEPIQRLGAYLVEGLVARKEASGNNIYHALRCREPEGKDLLSYMQLLYEICPYLKFGYMAANGAIAEACRNEDQIHIIDFQIGQGTQWVTLLQALAARPGGAPHVRITGIDDPLSKYVRGDGLEAVGKRLAAISQTFNIRVEFHGVPVLAPDVTKDVLDVRPGEALAVNFPLQLHHTADESVDMSNPRDGLLRLVKSLSPKVTTLVEQESNTNTTPFFNRFIETLDYYLAMFESIDVSLPRKSKVQINMEQHCLARDIVNIIACEGKERVERHELLGKWKSRLTMAGFRQYPLSSYMNSVIRSLLRCYSKHYNLVEKDGAMLLGWKDRNLISTSAWY

SEQ ID NO: 32464 - protein, 92 aa, Glycine max
  Clone ID: TF_GmC359_4.pep
MVERELYGREIMNVIACEGSDRIERPETYKRWQVRNMKAGFKQLPLNEELMAKFRSKLKEYHRDFVLDENNNWMLQGWKGRILFASSCWVPA

SEQ ID NO: 32465 - protein, 93 aa, Glycine max
  Clone ID: TF_GmC359_5.pep
MLERELLGREIMNVIACEGSERIERPETYKQWYVRNTRAGFKQLPLNEELMAKFRTKLKEWYHRDFVFDEDNKWMLQGWKGRILYASTCWVPA

SEQ ID NO: 32466 - protein, 179 aa, Glycine max
  unsure (1)..(179): unsure at all Xaa locations
  Clone ID: TF_LIB3138-095-Q1-N1-E2-F2B.pep
NESSIHIIDFGISYGFQWPCLIQRLSERPGGPPKLRMMGIDLPQPGFRPAERVEETGRWLEKYCKRFGVPFEYNCLAQKWETIRLEDLKIDRSEVTVVNCLYRLKNLSDETVTANCPRDALLRLIRRINPNIFMHGIVNGTYNAPFFVTRFREALFHFSSLXDMFEANVPREDPSXLMI

SEQ ID NO: 32467 - protein, 506 aa, Glycine max
  Clone ID: TF_GmC640_28.pep
MVSTSVCPGVFTSQQQQEFGVGDEKPQVINPQFMLNQNQVQFSENPSFFVPLMYPQVQVQEQQVFSPPHQSKRPLFDTIGHNFQAPRLPLLDSGQEVFGRRQQTQLPLFPHHMQQQQQQQQSMGLPSAKQQKVSSTGDDASHQFQQAIFDQLYKTAELIEAGNPVHAQGILARLNHQLSPIGKPFQRAAFYMKEALMSLLHSNAHSFMAFSPISFILKIGAYKSFSEISPVLQFANFTCNQALIEAVERFDRIHVIDFDIGFGVQWSSFMQELALRSSGAPSLKVTAIVSPSTCDEVELNFTRENLIQYAKDINVSFELNVFSIESLNSASCPLLGQFFDNEAIAVNMPVSSFTNYPSLFPSVLHFVKQLRPKVVVTLDRICDRIDVPLPTNVVHVLQCYSALLESLDAVNVNLDALQKIERHFIQPAIKKIILGHHHSQEKLPPWRNLFIQSGFSPFTFSNFTEAQAECLVQRAPVRGFHVERKPSSLVLCWQRKELISVSTWRC

SEQ ID NO: 32468 - protein, 473 aa, Glycine max
  Clone ID: TF_GmC978_1.pep
PGFEGSSSVNSSPLQFFSMMSLSPSLGSPNNLLFREMKSEERGLYLIHLLLTCANHVAAGVPENANTTLEQISMLASPDGDTMQRIATYFMESLADRILKTWPGIHRALNSTRMTLISDEILVQKLFFELFPFLKVAFVLTNQAIIEAMEGEKVIHIIDLNAAEAAQWIALLRVLSAHPEGPPHLRITGVHQKKEILDEVAHRLTEEAEKLDIPFQFNPVASKLENLDFDKLRVKTGEALAISSILQLHTLLAWDDEAMQRKSPLLLKSSNGIHLQRVLPMGQSTLGDLLEKDMVNGYTPSPDSTSSSPSSLTTSNSMKRERFLNALWGLSPKVMVVTEQDCNHNGPTLMDRLLEALYSYAALFDCLESTVSRTSLERLRVEKMLFGEEIKNIIACEGSERKERHEKLEKWFQRFDLAGFGNVPLSYFGMVQARRFLQSYGCEGYRMRDENGCVLICWEDRPMYSISAWRSRK

SEQ ID NO: 32469 - protein, 144 aa, Glycine max
  Clone ID: TF_LIB3242-303-Q1-J1-D1.pep
LKNKLRELEISLLGPDSDIVDSCGCSYKGGCHGASPMAKYNWDQIVEMIPKLNLKEVLIRCAQAVADDDIETAVGFMNNVLAKMVSVGGDPIQRLGAYMLEGLRARLESSGSIIYKALKCEQPTSNDLMTYMHILYQICPYWKF

SEQ ID NO: 32470 - protein, 578 aa, Glycine max
  unsure (1)..(578): unsure at all Xaa locations
  Clone ID: TF_GmC1018_5.pep
MPSSFSMDSQQLFSFELPYMSSLPTVPSLLGSLKYDTGNSPNSPFSTYFDSDTLSALSDGQEQYSPGEILSGVSPSCNSSLETNHYMYRSVSTLDSFPLYSDRNSLLQTMSSNQKIQHALLELETALMAPDDDQVNTPNTLAESSRPMASGQRSRSWSNENHVSQYTQTQPSYATANMQSSEVVHVEKRQKLMEEATLQDFPPNNLKQLLIACAKALSENNTKDFDQLVGKAKDAVSINGEPIQRLGAYMVEGLVARMQASGNSIYHALRCKEPEGEELLTYMQLLFEICPYLKFGYMAANGAIAQACRNEDHIHIIDFQIAQGTQWMTLLQALAARPGGAPHVRITGIDDPVSKYARGDGPEVVGKRLALMSEKFGIPVEFHGVPVFASDVTREMLDIRPGEALAVNFPLQLHHTADESVHVSNPRDGLLRXGKVTFSQGDHIGGAGIKHKHNPFLQQVHXKPWITTWQSLSPLMSPSQETARRGLMWSNIVXARDIVNIIACEGKERVERHELFGKWKSRLKMAGFQQCPLSSYVNSVIRSLLRCYSEHYTLVEKDGAMLLGWKDRNLISASAWHC

SEQ ID NO: 32471 - protein, 597 aa, Glycine max
  Clone ID: TF_GmC589_1.pep
VNKRRTMSLVISTELADTSYGNAKLYTLKGTDVTPDLSSHNFAPDKHRNMYMTKSYSCESYEKYFHDSPTEELIEPSSSSISGNSVHPDGASSYLLRASSGASVIVNNPFDTSIWSTRHRDAYQSNSVSDFVENGSPDGLDFDGEMRLKLQELERALLSDEEEEEQGIFETVQSMEIDPDMVEWANPLQDMLLHDSPKESSSSDSSNLSSISSTTKDTSQNSPQTPKQLLYDCARILSEGNEQEATSMINKLRQMVSIQGDPSQRIAAYMVEGLAARVATSGKCIYQALRCKEPPSNDRLAAMQILFEVCPCFKFGYIAANGAIAEAVRDEKKVHIIDFDISQGTQYITLIQTLASMPGRPPHVRLTGVDDPESVQRSIGGINIIGQRLDSSRSSRFGSSEFRAVASGTSNVTQSMLDCRPGEALVVNFAFQLHHMRDETVSTVNERDQLLRMVKSLNPKLVTVVEQDMNTNTSPFLPRFVEAYNYYSAVFNTLDATLPRESQDRMNVERQCLAKDIVNIVACEGEERIERYEVAGKWRARLSMAGFTPSPMSTNVREAIRKLIIKQYCDKFKIKEEMGGLHFGWEDKNLIVASAWK

SEQ ID NO: 32472 - protein, 503 aa, Glycine max
  Clone ID: TF_GmC6703_1.pep
MDTLFRLVSFHQQQQPQQQPDPSLNSTTSRTSSSSRSSRQNYYPYSHQEEEECFNFYMDEEDLSSSSSKHYYHPYQPHHHQQHNVSNISTNTFSTTPNTDYSYSYSFSPTQPVQDFNFEFSSPNWSHNLLLESARAVADNNSTRLHHLLWMLNELSSPYGDTEQKLAAYFLRALFSRVTEAGDRTYRSLASASEKTCSFESTRKTVLKFQEVSPWTTFGHVASNGAILEALEGNSKLHILDISNTYCTQWPMLLEALATRSEETPHLCLTTIVTGSRIGNNVQRVMKEIGTRMEKFARLMGVPFKFNVVHHYGDLSEFNFSELDIKDDEALAVNCVNSLHSVSALGNNRDALISALQALQPRIVTVVEEEADLDVGIDGYEFVKGFEESLRWFRVYFEALDESFVKTSNERLMLERAAGRAVVDLVACSPADSVERRETAARWAARLHNGGLNAAPFSDEVCDDVRALLRRYKEGWSMAACSDAGIFLSWKDTPVVWASAWRP

SEQ ID NO: 32473 - protein, 532 aa, Glycine max
  unsure (1)..(532): unsure at all Xaa locations
  Clone ID: TF_GmC1116_1.pep
MKCCDVICRGEEGMAAYMCADSGNLMAIAQQVIKQKQQQEQQQQQQQQQQQQQHLLHHQQNPLSLHTPIPWNNTPPLGYPLPPTTDFPPDPFQPDPPFHFQPDPHSFRFSDFDSDDWMDSLIAAADTTDFXLPPLRSQPAPSPTXLPPSPPPPPAQSPVDSDSDSSVHPLLXALAECASLAETEPDQAAESLSRLRKSVSQHGNPTQRVGFYFWQALSRREEKGHNSTWDEELTLSYKALNDACPYSKFAHLTANQAILEATQTASNIHIVDFGIVQGIQWAALLQAFATRPSGKPNKIRISGIPAVSLGPSPGPSLSATGNRLSDFARLLDLNFVFTPILTPIHQLDHNSFCIDPNEVLAVNFMLQLYNLLDEPPSAVDTALRLAKSLNPRIVTLGEYEASVTRVGFVNRFRTAFKYFSAVFESLEPNLAADSPERFQVESLLLGRRIAAVIGGPGSVRRESMEDKEQWRVLMERAGFESVSLSHYAISQAKILLWNYSYSSLFSLVESTPPGFLSLAWKDVPLLTVSSWR

SEQ ID NO: 32474 - protein, 94 aa, Glycine max
  Clone ID: TF_GmC154430_1.pep
KRAKMEQFYFAEEIKNIVSCEGPLRMERHERVDQWRRRMSRAGFQAAPIKMVAQSKQWLLKNKVCEGYTVVEEKGCLVFGWKSRPIVAVSCWKC

SEQ ID NO: 32475 - protein, 522 aa, Glycine max
  unsure (1)..(522): unsure at all Xaa locations
  Clone ID: TF_GmC510_1.pep
MPTNRSVFMFRYIPISALTTLLAPTTGPCPWTGPNFGYRNSNLGFPPIQNRVRLSPPVSVPVQVQSSEPEKKIMDHRLLELEKQLLEDNDEXGEADAASGITTSEWSESVPVRFSXPVLTPTSPTSSTTSSTSSSSSVASPASGCSKQTLMEAASAIVEGKHDVAAEILNRLNGVNRSDRLTDCMVSALKSRMNPVEYPPPVAELFRKEHADSTQMLLENSVLLLDNSVCFKVGFMAANYAILEAAFEEKTENNRFCVVDFEIGKGKQYLHLLNALSARDQNAVVKIAAVAEKGGEERVRAVGDMLRLLAERLRIRFEFKIVATQKIAELTRESLGCDADDVLMVNFAFKLNKIPDESVSPENPRDELLRRVKRLAPRVVTVVEQEINGNTAPFLARVAETLSYYGALLESIEATTVGKDNSINNSDRVRLEEGLSRKLHNSVACEGRDRVERCEVFGKWRARMSMAGFELKPLSQSMVESIKARLISANNRVNSGLTVKEENGGICFGWMGRTLTVASAWR

SEQ ID NO: 32476 - protein, 262 aa, Glycine max
  Clone ID: TF_GmC977_1.pep
DFGIRYGFQWPALIYRLSKQPGGPPKLRITGIELPQPGFRPAERVQETGLRLTRYCDRFNVPFEFNAIAQKWETIKIEDLKIKENELLVANAMFRFQNLLDETVVVNSPRDAVLKLIRKANPAIFLHANVNGSYNAPFFVTRFREALFHYSTLFDVLDTNVACEDPMRLMFEREFFGRQVMNIVACEGCERVERPETYKQWQVRNMRAGFKQLPLDKHLINKLRCKLKDAYHSDFMLLEDDNYMLQGWKGRVVYASSCWVPA

SEQ ID NO: 32477 - protein, 266 aa, Glycine max
  unsure (1)..(266): unsure at all Xaa locations
  Clone ID: TF_GmC194417_1.pep
LASGSSLLLSPKRHPLESPDGNSSNSTTDSANSHDLKPSSPNTPASDALHSSSHAPSLVVPPHALTKINDGTVDLDSSVTKLLAENIFSDADSMLQFKRGLEEASKFLPQGPQLFTGLESPTVSSEPKGRGVALKMENSFGVKNRKNHARQDDEEERSNKQSAVSAVCVEEESEISEIFDRVLLSVENVPLCAENNGSVAVGDSNTKLIEKSSLSDGGKGSIQEAREKEETVDLRTLLVLCAQAVSFSDNRTXYELLKQISSILLL

SEQ ID NO: 32478 - protein, 94 aa, Glycine max
  Clone ID: TF_GmC104019_2.pep
PRVRNVEQHCLARDLVNIIACEGVERVERHEVLGKWRSRFAMAGFTPYPLSSLVNGTIKKLLENYSDRYRLQERDGALYLGWMNRDLVASCAWK

SEQ ID NO: 32479 - protein, 316 aa, Glycine max
  Clone ID: TF_GmC1018_1.pep
SLKVNCESLTCNCYYEICPYLKFGYMAANGAIAQACRNEDHIHIIDFQIAQGTQWMTLLQALSKYARGDGLEVVGNRIINPCDPNMGIDDPVSKYARGDGLEVVGKRLALMSEKFGIPVEFHGVPVFAPNVTREMLDIRPGEALAVNFPLQLHHTADESVHVSNPRDGLLRLVRSLSPKVTTLVEQESNTNTTPFFNRFIETLDYYLAIFESIDVTLPRDSKERINVEQHCLARDIVNIIACEGKERVERHELFGKWKSRLTMAGFRQCPLSSYVNSVIRSLLMCYSEHYTLVEKDGAMLLGWKDRNLISASAWHC

SEQ ID NO: 32480 - protein, 202 aa, Glycine max
  unsure (1)..(202): unsure at all Xaa locations
  Clone ID: TF_GmC538_1.pep
VEFEYNAIAKKWETIQLEELKIDRDEYLVVTCFYRXKNVLDESVVVDSPRNKFLSLIRKINPNIFIHGITNGAFNAPFFVTRFREALFHYSSLFDMLEAIVSREEWERMLIEKEIFGREALNVIACEGCERVERPETYRQWQARILRAGFLQQPFEREIVKRAIEKVTTSYHKDFVIDEDSQWLLQGWKGRIIYALSCWKPA

SEQ ID NO: 32481 - protein, 505 aa, Glycine max
  Clone ID: TF_GmC164_1.pep
MASSSSNGSSSGSKSWDIDGDLAGFGYKVRSSELQHVAENMERLENVMDIVNSSTNNNISQLASDTVFYNPSDIGSWVDTLLSEFDQTASLPYDFSDFLDLDTDQNQNHKPTLVTMEEDSGIRLVHTLMTCADSVQRGDLAFAGSLIENMQGLLAHVNTNIGIGKVAGYFIDALRRRILGQGVFQTLSSSSYPYEDNVLYHHYYEACPYLKFAHFTANQAILEAFNGHDCVHVIDFNLMQGLQWPALIQALALRPGGPPLLRLTGIGPPSSDNRDTLREIGLRLAELARSVNVRFAFRGVAAWRLEDVKPWMLQVNPNEAVAVNSIMQLHRLLASDSDPIGSGIETVLGWIRSLNPKIISVVEQEANHNQDRFLERFTEALHYYSTVFDSLEACPVEPDKALAEMYLQREICNVVSSEGPARVERHEPLAKWRERLEKAGFKPLHLGSNAYKQASMLLTLFSAEGYSVEENQGCLTLGWHSRPLIAASAWQAAPMQDRETLRFEQ

SEQ ID NO: 32482 - protein, 416 aa, Glycine max
  Clone ID: TF_GmC359_8.pep
EIVCNERCSSQSETVKAVEPGGVKGLPNNRATYQETVDLRNLLMMCSQSVYANDIRAANELLKQIRQHSSPIGDASQRLAHYFANGLEARLVGDGTSTQGMYTFLSSKNNTFSELLKAYQVFSSSSPFKKFAYLFENTMIMKAAASAETVHIIDFGILHGFQWPMLIRLLSNREGGPPKLRITGIEFPQPGFRPTEKIEETGRHLANYCKRYNVPFEYNAISSRNWETIQLEALKIASNELVAVYCHQRFENLLDECTIEVNSPRNAVLHLIRKINPDIFTHSITNGSYNAPFFTTRFREALFHYSAISDKNDTVISRENERRLMVERELYGREIMNVIACEGSDRIERPETYKRWQVRNMKAGFKQLPLNEELMAKFRSKLKEYHRDFVLDENNNWMLQGWKGRILFASSCWVPA

SEQ ID NO: 32483 - protein, 488 aa, Glycine max
  Clone ID: TF_GmC164_2.pep
MKMISSASNENKTVVDMDDHLAGLGYKVRSSELCQVAANMERLENVISSTDLSQLASDTTLYDPSNIGLGSWVDTLLSEFDQTASLPLQYDFATDPNHNKQLALVTTVEEDSGIRLVHMLMTCADSVQRGDFSFAGSLIENMQGLLAHVNTNCGIGKVAGYFIDALRRRISNTLPTSSSTYENDVLYHNYYEACPYLKFAHFTANQAILEAFNGHDCVHVIDFNLMQGLQWPALIQALALRPGGPPLLRLTGVGPPSAENRDNLREIGLRLAELARSVNVRFAFRGVAAWRLEDVKPWMLQVSLNEAVAVNSIMQLHRVTAVDAAVEEVLSWIRSLNPKIVTVVEQEANHNGEGFLERFTEALHYYSTVFDSLDACPVEPDKAALAEMYLQREICNVVCCEGPARLERHEPLAKWRDRLGKAGFRPLHLGFNAYKQASMLLTLFSAEGFCVQENQGSLTLGWHSRPLIAASAWQAAPLRDDETLRFGH

SEQ ID NO: 32484 - protein, 280 aa, Glycine max
  unsure (1)..(280): unsure at all Xaa locations
  Clone ID: TF_GmC163_1.pep
EISQLSTPFGTSAQRVAAYFSEAISARLVSSCLGIYATLPHTHQSHKVASAFQVFNGISPFVKFSHFTANQAIQEAFEREERVHIIDLDIMQGLQWPGLFHILASRPGGAPYVRLTGLGTSRKAPELVHSWGGXVGAINYYSALVDSLGSSYGEESEERXHVVEQQLLSREIRNVLAVGGPSRTGDPKFQNWREKLQQCGFRGISLAGNAATQASLLLGMFPSEGYTLVDLEGADMSWVGVFFSTRGNSYSTTFHERIPQKPFFTFIGSCTHFMSAFFLF

SEQ ID NO: 32485 - protein, 219 aa, Glycine max
  Clone ID: TF_700566412_FLI.pep
MTKDLALILHEFLCVQIMLPSRAESARAARGELELENLVIQPGEALVVNFPFVLHHMPDESVSTENHRDRLLRLVKSLSPKVVTLVEQESNTNTSPFFQRFVETLSYYTAMFESIDVALPRDDKQRINAEQHCVARDIVNMVACEGDERLERHELLGKWRSRFSMAGFAPCPLSSSVTAAVRNMLNEFNENYRLQHRDGALYLGWKSRAMCTSSAWRCY

SEQ ID NO: 32486 - protein, 129 aa, Glycine max
  Clone ID: TF_GmC3121_16.pep
KKIKVSLIQKSLNQDAKTNTPSTFVYIYKKHVYSLNRPRTRGPLETSEYILVLQPTLLLLHKTTTTTTTTSTKSKQLTTSTSVSSHLQLNQQTPRLSPRANSCSWLRRKPACVWSTLSWRARRPSSRRI

SEQ ID NO: 32487 - protein, 395 aa, Glycine max
  unsure (1)..(395): unsure at all Xaa locations
  Clone ID: TF_GmC359_9.pep
GGKGRSKKQGIRKKETVDLRNLLLMCSQSVYANDNRTANELLKQIRQHSSPVGDASQRLAHYFTNGLEARLVGDGTSAQGMYTFLSSKNITVAEFLKAYQVFTSSSPFKKFIHFFANKMIMKAAAKAETVHIIDFGILYGFQWPILIKFFSNREGGPPKLRITGIEFPQPGFRPAERIEETGHRLANYCKRYNVPFEYNAIASKNWENIQVEALKIQSNELVAVNCHLRFENLLDESIEVNSPRNAVLHLIRKINQDIFTQSITNGSYNAPFFATRFREALFHYSATYELIDTVIPRENEWRLMIERELLGREIMNVIACEGSQRIERPETYKQWQVRNTRAGFKKLPLNEELMAKLRTALXNGTTDFVLDEDNNWLLQGWKGHILYASTCWVPA

SEQ ID NO: 32488 - protein, 280 aa, Glycine max
  unsure (1)..(280): unsure at all Xaa locations
  Clone ID: TF_GmC112744_1.pep
MLQSLVPRSPRTSNPNAMKTKRAVDAGGDSPADEPSFKRTNFSGEKTTAEAEEEQAFDPEPHGGDSTGLKLLGLLLQCAECVAMDNLDFANDLLPEIAELSSPYGTSPERVGAYFAQALQARVVSSCIGSYSPLTAKSVTLTQSQKIFNAFQSYNSVSPLVKFSHFTANQAIFQALDGEDRVHIIDLDIMQGLQWPGLFHILASRSKKIRSVRITGFGSSSELLDSTGRRLADFASSLGLPFEFFPVEGKIGSVTELSQLGVRPNEAIVVHWMHHCLYXI

SEQ ID NO: 32489 - protein, 525 aa, Glycine max
  Clone ID: TF_GmC509_1.pep
MRVPVPSSPQANPKPTNNVVRTIALPNLNNSTTPPTGLCYEPTSVLDLCRSPSPGTEKPTTDHSVLVTNSQDYLDLEDHALHNLDWDSIMKDLGLHDDSATPVLKTFLHPDDDDDDDNNNNPSCDDFTLFDHALEFTTLSDIYSNQNFAFDFNHLPHDFNHLNGFDFIEELIRAADCFDTKQLHVAQLILERLNQRLRSPVGKPLHRAAFYLKEALQSLLSGSNRTPRISSLVEIVHSIRTFKAFSGISPIPMFSIFTTNQIVLDHAASSFMHVIDFDIGLGIQYASLMKEIAEKAADSPVLRITAVVPEEYAVESTLVRDNLAQFALDLRIRVQVEFVPLRTFENLSFKAVKFVDGENTAVLLSPAIFRHLGNAAAFLADVRRISPSVVVFVDGEGCAETATASAASFRRGVVSSLEYYSMMLESLDASTVVGGGEWVRRIEMMQLRPKILAAVESAWRRVPPWREAFYGAGMRPVQLSQFADFQAECLLAKSQIRGFHVAKRQNELVLFWHDRAIVATSAWRC

SEQ ID NO: 32490 - protein, 278 aa, Glycine max
  Clone ID: TF_GmC406_1.pep
SICNLSEDAKTIHIIDFGIRYGFKWPALISRLSRRPGGPPKLRITGIDVPQPGLRPQERVLETGRRLANYCKRFNLPFEFHAIAQRWDTIRVEDLKIETDEFVAVNCLFQFEHLLDETVVLNNPRDAVLRLIKNANPDIFVHGIVNGSYDVPFFVSRFREALFHYTALFDMLDTNVARQDPMRLMFEKELFGREIVNIIACEGFERVERPQTYKQWQLRNMRNGFRLLPLDHRIIGKLKDRLRDDAHNNNFLLEVDGDWVLQGWKGRILYASSCWVPA

SEQ ID NO: 32491 - protein, 119 aa, Glycine max
  Clone ID: TF_jC-gmst024114c12a1.pep
FTSLSDIYSNQNLAFDFNHLPHDFNHHLNGFDFIEELIRAADCFDTKQLHVAQVILERLNQRLRSPVGKPLQRAVFYFKEALQSLLSGSNRTPRISSLVEIVHSIRTFKAFSGISPIPM

SEQ ID NO: 32492 - protein, 461 aa, Glycine max
  Clone ID: TF_GmC588_1.pep
MRLSSVTSSPLQFFSMMSLSVSPSLGSPYQMKCEQRGLVLIHLLLAGANFVATGDLQNANLTLEQISQHASLDGDTMQRIASYFSEALADRILKTWPGIHRALNSSRITMVSDEILVQKLFFELLPFLKFSYILTNQAIVEAMEGEKMVHIVDLYGAGPAQWISLLQVLSARPEGPPHLRITGVHHKKEVLDQMAHKLTEEAEKLDIPFQFNPVLSKLENLDFNKLRVKTGEALAISSIMQLHSLLALDEDASRRKSPLLSKNSNAIHLQKGLLMNHNTLGDLLDGYSPSPDSASSSPAASSSALMNSESFLNALWGLSPKVMVVTEQDFNHNCLTMMERLAEALFSYAAYFDCLESTVSRASMDRLKLEKMLFGEEIKNIIACEGCERKERHEKMDRWIQRLDLSGFANVPISYYGMLQGRRFLQTYGCEGYKMREECGRVMICWQERSLFSITAWRPRK

SEQ ID NO: 32493 - protein, 327 aa, Glycine max
  Clone ID: TF_GmC7815_20.pep
MQTSQKHPSSAGVHFYHQPVQGIYQMLQSNLCHDSSSQGTSVSFETCKEQYFTLESCPAPTTCFVDCDDSPSYASVSSKRTPFSPQGSQSCYSDHQQSSDNTYGSPISGLSSVDDGHELKHKLRELEISLLGPEQSDSCGCCVVKGGLQGSSQLAKHNWDQIAENVAQFDLKGVLRVCAQAVSDDDVPTARGWMDNVLGKMVSVSGDPIQRLGAYLLEGLRARLESSGNLIYKSLNCEQPTSKELMSYMHILYQICPYWKFAYISANAVIEEAMANESRIHIIDFQIAQGTQWHLLIQALAHRPGGPPSLRVTGVDDSQSIHARGGG

SEQ ID NO: 32494 - protein, 255 aa, Glycine max
  unsure (1)..(255): unsure at all Xaa locations
  Clone ID: TF_GmC160039_1.pep
TSSGSVSNASSESQSLRLNDNVSEHEVGNGSGNPYYHHRKVEAGEEDDHHGFELVSLLTGCVDAIGSRNVTAINHFIAKLGDLASPKGTTSISRICAYFTEALAIRVTRLWPHVFHIAAATTSRDMVEDDESATALRLLNQVTPIPKFLHFTSNEMLLRAVEGKDRVHIIDFDSTRGLQWPSLFQSLASRSNPPIHVRITGIGESKQDLNETGERLAGFAEVLNLPFEFHPVVDRXRDVRLWMPHVKEHETGAVN

SEQ ID NO: 32495 - protein, 434 aa, Glycine max
  Clone ID: TF_GmC1774_1.pep
MDGLGSPSQWLRELRWDSQGLNPISLLIDCAKCVASGSIKNADIGLEYISQISSPDGNAVQRMVTYFSEALGYRIIKNLPGVYKSLNPSKTSLSSEDILVQKYFYELCPFLKFSYLITNHAIAEAMECEKVVHIIDLHCCEPTQWIDLLLTFKNRQGGPPHLKITGIHEKKEVLDQMNFHLTTEAGKLDFPLQFYPVVSKLEDVDFEKLPVKIGDALAITSVLQLHSLLATDDDMAGRISPAAAASMNVQRALHMGQRTFAEWLERDMINAYTLSPDSALSPLSLGASPKMGIFLNAIRKLQPKLVVITEQESNLNGSNLMERVDRALYFYSALFDCLDSTVMKTSVERQKLESKLLGEQIKNIIACEGVDRKERHEKLEKWIRRLEMAGFEKVPLSYNGRLEAKNLLQRYSNKYKFREENDCLLVCWSDRPLF

SEQ ID NO: 32496 - protein, 265 aa, Glycine max
  Clone ID: TF_GmC170_7.pep
EHFEWNCLQSSSRWLLLIQALASRPGGPPFVHVTGVDDSQSFHARGGGLHIVGKRLSDYAKSCGVPFEFHSAAMCGSEVELENLVIQPGEALVVNFPFVLHHMPDESVSTENHRDRLLRLVKSLSPKVVTLVEQESNTNTSPFFQRFAETLSYYTAMFESIDVALPRDDKQRINAEQHCVARDIVNMVACEGDERVERHELLGKWRARFSMAGFAPCPLSSLVTDAVRNMLNEFNENYRLGYRDGALYLGWKNRAMCTSSAWRCY

SEQ ID NO: 32497 - protein, 114 aa, Glycine max
  unsure (1)..(114): unsure at all Xaa locations
  Clone ID: TF_LIB3242-531-P1-J1-H3.pep
LRDLDIMQGLQWPGLFHILASRPGGAPYVRLTGLGTSMEALEATGKRLSDFANKLCLPFEFFPVAEKVGNLDPERLNGSKTEAGAVHXLQHSLYDVTGSDTNTLWLXLQRLAPK

SEQ ID NO: 32498 - protein, 612 aa, Glycine max
  Clone ID: TF_GmC3864_1.pep
AKNSREANNRRIMSLVRSADLAPTSYENAKLFSLKGTDVRPGLSSQIFGPDKHRSMYMTDAYSGECYEKYFHDSQTEELIEPSSSSISGSSIHPDVASSYQLRASSGASMVANNPSDSSFMSTRHHDAYQSNSGSDLMENGSLDSRDDEGLMRLRLKALERALLDDSDAGEDEEEEEEEEEDIFEAAQSMEIDPDIAEWADSIHNMLLHGSPKESSSSDSNTSSISSTKEISQTSQTPKKLLYECAIALSEGNEVEGSSMINNLRQMVSIQGEPSQRIAAYMVEGLAARLAESGKSIYKALRCKEPPTSDRLAAMQILFEVCPCFKFGFIAANNAITEAVKDDMKIHIIDFDINQGSQYINLIQTLASRSSKPPHVRLTGVDDPESVQRSVGGLRNIGQRLEKLAEALGLPFEFRAVASRTSIVTPSMLNCSPDEALVVNFAFQLHHMPDESVSTVNERDQLLRLVKSLNPKLVTVVEQDVNTNTTPFLPRFVEAYNYYSAVFESLDATLPRESQDRMNVERQCLARDIVNVVACEGEDRIERYEVAGKWRARMTMAGFTSSPMSTNVTDEIRKLIKTVYCDRYKIKEEMGALHFGWEDKNLIVASAWKLPR

SEQ ID NO: 32499 - protein, 180 aa, Glycine max
  Clone ID: TF_GmC167117_1.pep
MEDSEEEELLNLTLSVDAGRERRIKKGRTRDNNNNTNSVIIPMKSNDGYEGKIFRLLQMRELMLRQDHRRKGVLLEDVNNNNNDGLPLIHLLLSTATAVDDDQRNYCAALENLIDLYQTVSLTGDSVQRVVAYFADGLAARLLTKKSPFYDMLMGEPTSEEEFLAFTDLYRGSPYYQFAH

SEQ ID NO: 32500 - protein, 453 aa, Glycine max
  unsure (1)..(453): unsure at all Xaa locations
  Clone ID: TF_GmC42017_1.pep
MICHMKKREATSFLLSTPMIRSHLACLMRCCFVRMVRVPSIFYAGREPSPSQIADSRGSNGKKTRSKRGSNKGTRASVTTVDLWTLLIQCAQAVASFDQRTANETLKQIRQHSSPFGDGLQRLAHYFADGLEKRLAAGTPKFISFQSASAADMLKAYRVYRXVTNQIAMSNFLAIRTILKLALNEMVKKEYHNGFVVGEDGTWVFQRLSERPGGPPKLLMTGIDLPQPGFRPAERVEETGRWLEKYCKRFGVPFEYNCLAQKWETIRLEDLKIDRSEVTVVNCLYRLKNLSDETVTANCPRDALLRLIRRINPNIFMHGVVNGTYNAPFFVTRFREALFHFSSLFDMFEVNVPRERRRQKGIEKGVFGRDAINVIACEGAERVERPETYKQWQVRNQRAGFKQLPLAPEHVNRVKEMVKKEHHKDFVVDEDGKWVLQGWKGRILFAVSSWVPA

SEQ ID NO: 32501 - protein, 451 aa, Glycine max
  unsure (1)..(451): unsure at all Xaa locations
  Clone ID: TF_GmC640_32.pep
CTLRCRNSRFSLSIRRNTISLTPLGTIFKLQGCPFWIQGKKCLVGGSKHSFHCFLTICSNNNNNNQWLCLLLNSRRVSSTGDDASHQLQQAIFDQLYKTAELIEAGNPVHAQGILXARLNHQLSPIGRPFQRAAFYMKEALMSLLHSNAHSFMAFSPISFIFKIGAYKSFSEISPVLQFANFTCNQALIEAVERSDRIHVIDFDIGFGVQWSSFMQEIALRSSGAPSLKVTAIVSPSTCDEVELNFTRENLIQYAKDINVSFEFNVLSIESLNSPSCPLLGKFFDNEAIVVNMPVSIFTNYPSLFPSVLHFVKQLRPKVVVTLDRICDQMDVPLPTNVVHVLQCYSALLESLDAVNVNLDVLQKIERHFIQPAIKKIILGHHHFQEKLPPWRNLFMQSGFSPFTFSNFTEAQAECLVQRAPVRGFHVERKPSSLVLCWQKKELISVSTWRC

SEQ ID NO: 32502 - protein, 545 aa, Glycine max
  Clone ID: TF_GmC491_1.pep
MQMSQKHKMSYDSSRFSIEPAQNLGSCCFLQSGNLDYYSSSDNGSHATYPSVCIFEQYCTLESSTNNNFPSLNSPSTVSFSPNNSPVSKLQSKPNVLSSQNSLEIVDESLENKSFLTLNDDELRHKIRELESAMLGHDTDILDTYDTIIPEESDSFLKEAERWKRMMEMISRGDLKEMLCTCAKAVAGNDMETTEWLMSELRKMVSVSGNPIQRLGAYMLEALVARLASSGSTIYKVLKCKEPTGSELLSHMHLLYEICPYLKFGYMSANGAIAEVMKEESEVHIIDFQINQGIQWVSLIQAVAGRPGAPPKIRITGFDDSTSAYAREGGLEIVGARLSRLAQSYNVPFEFHAIRAAPTEVELKDLALQPGEAIAVNFAMMLHHVPDECVDSRNHRDRLVRLAKCLSPKIVTLVEQESHTNNLPFFPRFVETMNYYLAIFESIDVALPREHKERINVEQHCLAREVVNLIACEGEERVERHELLKKWRSRFTMAGFAPYPLNSFITCSIKNLQRSYRGHYTLEERDGALCLGWMNQVLITSCAWR

SEQ ID NO: 32503 - protein, 298 aa, Glycine max
  Clone ID: TF_GmC172_2.pep
TEHAESTQLLFEYSLFFKVARMVANIAILESALTESGKLCVVDFDICDENQYVSLLHELSARRKGAPAAVKIVVVTENCADDERLNIVGVLLGRHAEKLGIGFEFKVLTRRIAELTRESLGCDADEPLAVNFAYKLYRMPDESVSTENPRDKLLRRVKTLAPRVVTLVEQDANANTAPFVARVTELCAYYGALFDSLESTMARENLKRVRIEEGLSRKVVNSVACEGRDRVERCEVFGKWRARMSMAGFRLKPLSQRVADSIKARLGGAGNRVAVKVENGGICFGWMGRTLTVASAWC

SEQ ID NO: 32504 - protein, 545 aa, Glycine max
  Clone ID: TF_GmC829_1.pep
MQTSQNHKISYGSGGFYAEPVQNLESYCMPSSENIDNYSSSDNSSQTTYPSVQTLEQYCTLESASTGNSFPNQNSPPALSFSSNNSPLSKLESNSYVLRPQHSLEIASGSPEDDSYLTHDLDDLTHKIRELETAMLGPNADMLDIYGTVIPEPDSFLLEAEKWKKMMEISSRGDLKEMLYMCAKAMAVNDMETTDWLVSELRKMVSISGNPIQRLGAYILESFVARIGASGSTIYKSLKCSEPTGNELLSYMNVLYEICPYFKFGYMSANGAIAEALREESEVHIVDFQIGQGTQWVSLIQALARRPVGPPKIRISGVDDSYSAYARRGGLDIVGKRLSALAQSCHVPFEFNAVRVPATEVQLEDLELLPYEAVAVNFAISLHHVPDESVNSHNHRDQLLRLAKRLSPKVVTLVEQEFNTNNAPFLQRFDETMKYYLAVFESIDTVLPREHKERINVEQHCLAREVVNLIACEGEERVERHELLNKWRMRFTKAGFTPYPLSSVINSSIKDLLQSYHGHYTLEERDGALFLGWMNQVLIASCAWR

SEQ ID NO: 32505 - protein, 519 aa, Glycine max
  Clone ID: TF_GmC509_2.pep
VSEFGSSNHVLHTNNNPNTFTYEPTSVLDLCRSPSPEKKLTVPKPEPQHNNQLDLDDHVLPNSDWWESIMKDLTLPEDSPTPLLKTNPSCIPDFPPSSQDPSFDHPTPDFTSLSEIYNQNIPFNYPSNTLEPSFHDLNHSLHPHNNNWDFIEEFIRAADCYDSSHFQLAQAILERLNNRLLRSPMGKPLHRAAFHFKDALQSILSGSNRNGNGSNLLSSMAEIVQTIKTYKAFSGISPIPMFSIFTTNQALLETLNGSSFVHVIDFEIGLGIQYASLMKEIAEKAGPGTAPLLRITAVVPEEYAVESRLVRQNLNQFAQDLGISAQVDFVPLRTFETVSFKAVRFIDGEKIAVLLSPTIFSRLGGNGGSVGAFLADVRRMAPGVVVFVDGEGWTEAAAAASFRRGVVSSLEFYSMMLESLDASVASGGGGEWVSRIEMLLLRPKIFAAVEGARRRTPPWREAFYGAGMRPVQLSQFADYQAECLLAKVQIRGFHVDKRHAELVLCWHERAMVSTSAWRC

SEQ ID NO: 32506 - protein, 168 aa, Glycine max
  Clone ID: TF_GmC164_4.pep
AVKSAVEEVLGWIRILNPKIVTVVEQEANHNGEGFLERFTEALHYYSSVFDSLDACPVEPDKAALAEMYLQREICNVVCCEGPARLERHEPLAKWRDRLGKAGFRALHLGFNAYKQASMLLTLFSAEGFCVQENQGSLTLGWHSRPLIAASAWQAAPLGDDETLRFEH

SEQ ID NO: 32507 - protein, 254 aa, Glycine max
  Clone ID: TF_GmC1717_1.pep
VQWASLIQALASNKTGPPGPHLRITALSRTGSGRRSIATVQETGRRLAAFAASLGQPFSFHHCRLEPDETFKPSSLKLVRGEALVFNCMLNLPHLSYRAPESVASFLSGAKALKPRLVTLVEEEVASIVGGFVARFMDSLHHYSAVFDSLEAGFPMQGRARALVERVFLGPRIVGSLARMGEEEERGSWGEWLGAAGFRGVPMSFANHCQAKLLIGLFNDGYRVEELGSNKLVLDWKSRRLLSASLWTSSSHSD

SEQ ID NO: 32508 - protein, 61 aa, Glycine max
  Clone ID: TF_4282525.pep
VVTFANFTCNQTLLEAVEGLDRIDIIYSVIGLGGQRSSFMQELALKNGSAPELKITGFVLP

SEQ ID NO: 32509 - protein, 146 aa, Glycine max
  Clone ID: TF_GmC82216_1.pep
KLITTVEQDLSHAGSFLARFVEALHYYSALFDALGDGLGADSLERHTVEQHLLGCEIRNIVAVGGPKRTGEVKLERWGDESKRAGFGPVSLRGNPAAQASLLLGMFPWRGYTLVEENGSLKLGWKDLSLLIASAWQPSDLMITYPD

SEQ ID NO: 32510 - protein, 76 aa, Glycine max
  Clone ID: TF_5760190.pep
GGDPIHMLRAYMLEGLIARLESSGSIIYNALKCEQPTRTDLMTYMHILYQICPYWKSAYTSANAVIAEAVLNDSRI

SEQ ID NO: 32511 - protein, 383 aa, Glycine max
  Clone ID: TF_GmC4051_1.pep
MLAAPKQKMVNSGSEDLATHQLQQAITEQLFKAAELIDAGNLELAHGILARLNHQLSPIGKPFQRAAFYFKEALQLLLHPNANNSSFTFSPTGLLLKIGAYKSFSEISPVLQFANFTCNQALLEAVEGFDRIHIIDFDIGLGGQWSSFMQELALRNGSAPELKITAFVSPSHHDEIELSFSQESLKQYAGELHMSFELEILSLESLNSASWPQPLRDCEAVVVNMPIGSFSNYPSYLPLVLRFVKQLMPKIVVTLDRSCDRTDAPFPQHLIFALQSYSGLLESLDAVNVHPDVLQMIEKYYLQPSMEKLVLGRHGLQERALPWKNLLLSSGFSPLTFSNFTESQAECLVQRTPSKGFHVEKRQSSLVLCWQRKDLISVSTWRC

SEQ ID NO: 32512 - protein, 187 aa, Glycine max
  unsure (1)..(187): unsure at all Xaa locations
  Clone ID: TF_9564347.pep
FGTRRYLSDDRKGISCQSFSLRDAFLNLIKGLNPRIVLLVDEDCDLSASSLTSRITTCFNHLWIPFDALETFLPKDSCQRSEFESDIGQKIENIIGYEGHQRIERLESGVQMSQRMKNVGYLSVPFCDETVREVKGLLDEHASGWGMKREEGXLVLTWKGNSCVFATAXVPCEILRDHHIGMDASLS

SEQ ID NO: 32513 - protein, 523 aa, Glycine max
  unsure (1)..(523): unsure at all Xaa locations
  Clone ID: TF_GmC214_1.pep
MKRERQQLGSNAGTSSCGYSSGKSNLWEEEGGMDELLAVVGYKVRSSDMAEVAQKLERLEEAMGNVQDDLTDLSNDAVHYNPSDISNWLQTMLSNFDPLPSEEPEKDSASSDYDLKAIPGKAIYGAGSDALPNPKRVRADESRRAVVVVDSQENGIRLVHSLMACAEAVENNNLAVAEALVKQIGFLAVSQVGARXQKATYFAEALARRIYRVFPQQHSLSDSLQIHFYETCPYLKFAHFTANQAILEAFQGKNRVHVIDFGINQGMQWPALMQALALRNDGPPVFRLTGIGPPAADNSDHLQEVGWKLAQLAERIHVQFEYRGFVANSLADLDASMLDLREDESVAVNSVFEFHKLLARPGAVEKVLSVVRQIRPEILTVVEQEANHNGLSFVDRFTESLHYYSTLFDSLEGSPVNPNDKAMSEVYLGKQICNVVACEGMDRVERHETLNQWRNRFGSTGFSPVHLGSNAYKQASMLLSLFGGGDGYRVEENNGCLMLGWHTRPLIATSVWQLATKSVVAAH

SEQ ID NO: 32514 - protein, 595 aa, Glycine max
  Clone ID: TF_GmC3121_1.pep
MKRDHKDSCGGGGAAGGTVKGECSSMQSNGKAKMWEEEQQQQQQQQQQQQQQGMDELLAALGYKVRASDMADVAQKLEQLEMVMGCAQEDGISHLASDTVHYDPTDLYSWVQSMLTELNPEPNNNLDPSSFLIDNNNNIINSTAPVFNDDSEYDLRAIPGIAAYPSSLPQDNHLDEIETANNINKRLKPSPAESADSAASEPTRHVVLVDHQEAGVRLVHTLLACAEAVQQENLKLADALVKHVGILAASQAGAMRKVASYFAQALARRIYGIFPEETLDSSFSDVLHMHFYESCPYLKFAHFTANQAILEAFATAGRVHVIDFGLKQGMQWPALMQALALRPGGPPTFRLTGIGPPQPDNTDALQQVGWKLAQLAQIIGVQFEFRGFVCNSLADLDPNMLEIRPGEAVAVNSVFELHRMLARSGSVDKVLDTVKKINPQIVTIVEQEANHNGPGFLDRFTEALHYYSSLFDSLEGSSSSSTGLGSPSQDLLMSELYLGRQICNVVAYEGPDRVERHETLTQWRGRLDSAGFDPVHLGSNAFKQASMLLALFAGGDGYRVEENNGCLMLGWHTRPLIATSAWKLPSSSESSGLTQ

SEQ ID NO: 32515 - protein, 141 aa, Glycine max
  Clone ID: TF_4292932.pep
QVTELAGYVDLIPWHRFGYCASNNEIYKAITGFQRVHIVDFSITHCMQWPTFIDGLAKRPEGPPSLRITVPSCRPHVPPLVNISIHEVGLRLGNFAKFRDVPFEFNVIGNTEGPLTPAELSDESTSHFEAMLSLLNPTMLN

SEQ ID NO: 32516 - protein, 235 aa, Glycine max
  Clone ID: TF_GmC104019_1.pep
PHIRITGIDDSTSAYARGGGLHIVGRRLSKLAEHFKVPFEFHAAAISGFDVQLHNLGVRPGEALAVNFAFMLHHMPDESVSTQNHRDRLLRLVRSLSPKVVTLVEQESNTNTAAFFPRFLETLDYYTAMFESIDVTLSREHKERINVEQHCLARDLVNIIACEGVERVERHEVLGKWRSRFAMAGFTPYPLSSLVNGTIKKLLENYSDRYRLQERDGALYLGWMNRDLVASCAWK

SEQ ID NO: 32517 - protein, 201 aa, Glycine max
  Clone ID: TF_GmC7815_16.pep
CGVPFEFRSAAISGCEVVRGNIEVLPGEALAVSFPYVLHHMPDESVSTENHRDRLLRLVKRLSPKVVTIVEQESNTNTSPFFHRFVETLDYYTAMFESIDVACPRDDKKRISAEQHCVARDIVNMIACEGVERVERHELLGKWRSRLSMAGFKQCQLSSSVMVAIQNLLKEFSQNYRLEHRDGALYLGWMNRHMATSSAWR

SEQ ID NO: 32518 - protein, 174 aa, Glycine max
  Clone ID: TF_GmC191976_1.pep
FHEGVSHIGFVHYLSPSIVVLVKQEGSCRSLKTFLSRFHESLHYFAAMFDSLDDCLPLESTHRLRIEKQLLGKEIKSMLNYDMDDGVEYYCPKYDRMETWKGRMENHGFVGRKISSKCVIQAKLLLKMRTHYYPLQFEEEGGGGFRVSERDEGRVISLGWQNRFLLTVSAWQPV

SEQ ID NO: 32519 - protein, 107 aa, Glycine max
  unsure (1)..(107): unsure at all Xaa locations
  Clone ID: TF_15001148.pep
AVASFDQRNANDLLSQIRQHSSAFGDGLQRLAHYFANGLETRLAAGTPSYMPLEGTTSADMLKAYKLYVTSSPLQRLTXLFGNPDIVSLVENEGSVHIIDFGICYGF

SEQ ID NO: 32520 - protein, 548 aa, Glycine max
  Clone ID: TF_GmC170_3.pep
MQTSKKHPTSAGIHLYLQPAQDIDPYTHYQILQSNSCHDNSSSQGTTISFETSKEQYFTLESSPAINDLIGCDSPSYASVSSNRSPFSPQASHSDQHQSSDNTYGSPTSAHSRYDDDGYELKNKLRELEISLLGPDSDIVDSWHCSYKGGRHRASSPTAKHNWDQIVEMIPKLDLKEVLIRCAQAVADDDIETAVGFMNNVLAKMVSVGGDPIQRLGAYMLEGLRARLESSGSIIYKALKCEQPTSNDLMTYMHILYQICPYWKFAYTSANAVIGEAMLNESRIHIIDFQVAQGTQWLLLIQALASRPGGAPFIRVTGVDDSQSFHARGGGLHIVGKRLSDYAKSCGVPFEFHSAAMCGSELELENLVIQPGEALVVNFPFVLHHMPDESVSTENHRDRLLRLVKSLSPKVVTLVEQESNTNTSPFFQRFVETLSYYTAMFESIDVALPRDDKQRINAEQHCVARDIVNMVACEGDERLERHELLGKWRSRFSMAGFAPCPLSSSVTAAVRNMLNEFNENYRLQHRDGALYLGWKSRAMCTSSAWRCY

SEQ ID NO: 32521 - protein, 77 aa, Glycine max
  Clone ID: TF_700837816H1.pep
EMLDIRPGEALAVIFPLQLYHTADVSVHVSNPRVGLLSLVRLLSPKVTTFVEQESNTNTTPFFNRFIETLDYYLAIF

SEQ ID NO: 32522 - protein, 156 aa, Glycine max
  Clone ID: TF_GmC96540_1.pep
AVISSLRRLKPRIVTVVEEEADLDIGLEGFEFVKGFEECLRWFRVYFEALDESFPRTSNERLMLERAAGRAVVDLVACSPADSVERREKAARWARRMHGGGGFNTVAFSEEVCDDVRALLRRYREGWAMTQCSDAGIFLTWKEQPVVWASAWRALT

SEQ ID NO: 32523 - protein, 237 aa, Glycine max
  Clone ID: TF_GmC164_3.pep
MERLEGVISDTILYDPSNIGLGSLVDTLLSDLDQTMSLPSHYHLSSDLPDFATTVEEHSGIRLIHTLMTCADSLQRGHFSFAASLIQNMQGLLAHVNTNCGIGKVAACFIDALRRRISNKFPASSAYENDVLYHNYYEACPYLKFAHFTANQAILEAFNGHDCVHVIDFNLMQGLQWPALIQALALRPGGPPLLRLTGIGPPSAENRDNLREIGLRLAELARSVNVRFAFRGVAAWR

SEQ ID NO: 32524 - protein, 250 aa, Glycine max
  Clone ID: TF_GmC161879_1.pep
RRLALSGRQGGPPWLRISRAQLPQPGFRPAERVEETGRRLANYCKKFKVPFEYNCLAQKWETIKLADLKIDRNEVTVVSCFYRLKNLPDETVDVKSPRDAVLKLIRRINPNMFIHGVVNGTYNAPFFLTRFREALYHFSSLFDMFEANVPREDPERVMLENGLFGRDAINVIACEGAERVERPETYKQWQVRNQRAGFKQVRFDPLLVNDEKEMVKKEYQKDFVVAEDGKWVWLGWKGRILNAISAWTPA

SEQ ID NO: 32525 - protein, 144 aa, Glycine max
  unsure (1)..(144): unsure at all Xaa locations
  Clone ID: TF_LIB4200-008-Q1-N1-D10.pep
LHYYSTVFDSLEACPVEPDKALAEMYLQREICNVVAXEGPARVERHEPLAKWRERLEKAGFKPLHLGSNAYKQASMLLTLFSAEGYSVEENQGCLTLGWHSRPLIAASAWQAAPMQDRETLRFRAMSFKNRKNCLIIVVTSKQE

SEQ ID NO: 32526 - protein, 588 aa, Glycine max
  Clone ID: TF_GmC172_1.pep
MSSPRFPGGGASDFYGGAGGFPSQFTAVQPTMNNHSATTPRPLYRSQPSILLNPSSHIAQHQPSPLIGKRTLAEFQTHNLNSRNNNNDNPLLSNHLLRSVKPRTFQHTELSTFPSRRYGLPLLHHLRPNAVNAQQQPVTNSILANTNYLSPVHSRLTATHEPEKNLIALRLQELEKQLLEDNEDDAVSVITTTTSEWSHTIQNLITPQKPASSSPTSSTTSSNTSVESSSYKQSLTEAATAISEGKFDAATEILTRLLLNSDQRFVNCMVSALKSRMNHVECPPPVAELFGTEHAESTQLLFEYSLFFKVARMVANIAILESALTENGKLCVLDFDIGDGNQYVSLLHELSARRKGAPSAVKIVAVAENGADERLNSVGLLLGRHAEKLGIGFEFKVLIRRIAELTRESLDCDADEALAVNFAYKLYRMPDESVSTENPRDELLRRVKALAPRVVTLVEQEANANTAPFVARVSELCAYYGALFDSLESTMARENSARVRIEEGLSRKVGNSVACEGRNRVERCEVFGKWRARMSMAGFRLKPLSQRVAESIKARLGGAGNRVAVKVENGGICFGWMGRTLTVASAWC

SEQ ID NO: 32527 - protein, 439 aa, Glycine max
  Clone ID: TF_GmC997_1.pep
MDISPYTTPKKLSPHSNNHNNIIADEAAALLDHNNMHRSNHSHTSTSRSSDSSEPSEDGKWAPKLLRECAKAISERDSSKTHHHLWMLNELASPYGDCDQKLASYFLQALFCRATESGERCYKTLSSVAEKNHSFDSARRLILKFQEVSPWTTFGHVASNGALLEALEGEPKLHIIDLSSTLCTQWPTLLEALATRNDETPHLKLTVVAIAGSVMKEVGQRMEKFARLMGVPFEFNVISGLSQITKEGLGVQEDEAIAVNCVGALRRVQVEERENLIRVFKSLGPKVVTVVEEEADFCSSRGDFFKCFEECLKFYTLYFEMLKESFPPTSNERLMLERECSRSIVRVLACCGTGHEFEDDHGEFDCCERRERGIQWCERLRNAFSPSGFSDDVVDDVKALLKRYQSGWSLVVTQGDEHISGIYLTWKEEPVVWASAWKP

SEQ ID NO: 32528 - protein, 363 aa, Glycine max
  Clone ID: TF_GmC7815_18.pep
LAVSDDDVPTARGWIDNVLGKLVSVSGDPIQRLGAYLLEGLRARLESSGNLIYKSLKCEQPTSKELMSYMHILYQICPYWKFAYISANAVIQETMANESRIHIIDFQIAQGTQWHLLIQALAHRPGGPPSLRVTGVDDSQSTHARGGGLWIVGERLSDFARSCGVPFEFHSAAISGCEVVRGNIEIRAGEALAVNFPYVLHHMPDESVSTENHRDRLLRLVKSLSPKVVTFVEQESNTNTSPFFQRFVETLDYYTAMFESIDVACPRDDKKRISAEQHCVARDMVNMIACEGVERVERHELFGKWRSRLSMAGFKQCQLSSSVMVATQNLLKEFSQNYRLEHRDGALYLGWMNRHMATSSAWR

SEQ ID NO: 32529 - protein, 107 aa, Glycine max
  Clone ID: TF_GmC3121_15.pep
NQDLLMSKLYLGRQICNVVANEGTDRVERHETLSQWRGRLDSAGFDPVHLGSNAFKQASMLLALFAGGDGYRVEENNGCLMLGWHTRPLIATSAWKLPSPNDLHCKL

SEQ ID NO: 32530 - protein, 149 aa, Glycine max
  Clone ID: TF_GmC979_1.pep
NSAPVKNGKYTYPILLDADWGSGIVKDREALCLYAASYGNAARGTVKDREALCLYAASYGNAARFINHRCLDANLVEIPVEVEGPTHHYYHFAFFTSRKVAAQEELTWDYGINFDEHDDQPIELFQCRCSSKFCRNIKRLNRSMRSSSS

SEQ ID NO: 32531 - protein, 55 aa, Glycine max
  Clone ID: TF_uC-gmroLIB3258053g01a1.pep
SSLHVAFCALRHIPPMTELTYDYGLAQSDRAEGSMAAKGRKKCLCGSSKCRGSFG

SEQ ID NO: 32532 - protein, 348 aa, Glycine max
  unsure (1)..(348): unsure at all Xaa locations
  Clone ID: TF_GmC1246_1.pep
MPAMKKNPELTCIGSVFNMLGKELGEPVDFELPDSFNKSKPMQYTYIKRNIYLTKKVKRSRFDDDGIFCSCTPSPGSTSVCGRDCHCGMLLSSCSSGCKCGSSCLNKPIQNRPVKKMKLVKTEKCGSGIVADEDIKLGEFVIEYVGEVVKGVLXNFGHGILVMVECMIFSYEYINHLVVKSFSSLLITSWSRFFKDPSLPFSHIIFHTCGNXFIPLLSPMXQGEHLTYDYQFVQFGADQDCHCGAAECRRKLGVRPTKSKLSSDAALKLVAYQVYQNGGLQIGSSRVVDQPKCLHNCIGEVIRIKHLENERFGIIKRFDKYSRKHSIMFEDGCVEIYDMSKEDFELVR

SEQ ID NO: 32533 - protein, 114 aa, Glycine max
  unsure (1)..(114): unsure at all Xaa locations
  Clone ID: TF_18690744.pep
ACVPGDLNCSCIRRNEGDFPYTGNGILVSRKPLVHECGPTCQCFPNCKNRVSQTGLKHPMEVFRTKDRGWGLRSLDPIRAGTFICEYAGEVVDRGKVSQLVKEGNEYVFDXPVF

SEQ ID NO: 32534 - protein, 220 aa, Glycine max
  unsure (1)..(220): unsure at all Xaa locations
  Clone ID: TF_GmC270_2.pep
MLVKGCNSNVLCAFFVLQVVNYWAGKGISGFTVYKFRLRRLEGQPTLTXNQVYFTYGRVPQTLTKIRGLVCEDITEGQENMPIPAKLXGDAPPVPPGKGFTYCKFVKVAKNVKLPMNATGCECKGICNDPTTCACALRNGSDFPYVSRDGGRLVEAKDVVFECGPECGCGPGCVNRTSQRGLRYRLEVFRTAKKGWAVRSWDFIPSGAPVCEYTGLLARA

SEQ ID NO: 32535 - protein, 171 aa, Glycine max
  Clone ID: TF_jC-gmXLIB3563P049dd06a1.pep
SSSTSSRTGIILADLSTGVESIPVSLVNEVDNEKGPSFFTYFHSLRDPKPFSLAQSSYGCNCNKTCVPGDLSCSCIQRNEGDFPYTANGVLVSRKPLVHECGPLCKCFPNCKNRVSQTGLKHQMEVFKTKDRGWGLRSLDPIRAGTFICEYAGEVIDIAKVNKNRGYDDEY

SEQ ID NO: 32536 - protein, 158 aa, Glycine max
  Clone ID: TF_GmC5793_1.pep
LRTLEDLPKGAFVCEFVGEILSMKELHERNLKCTENGKYTCPVLLDANWDSGYVKDEEALCLDAASFGNTARFINHRCSDANLIEIPVEVEDPGHYYYHFAFFTSRKISAQEELTWDYGIDFDDHDHPVKLFQCRCGSKFCRNMKRYSRSLRYASIAG

SEQ ID NO: 32537 - protein, 131 aa, Glycine max
  unsure (1)..(131): unsure at all Xaa locations
  Clone ID: TF_9819698.pep
ELPKTVNSEINEIEPLSAARCRVFIRPSRKKDEVPIIHLXGGQTXHSLSAITQLNSNKDAQVFSSLKERLHHLQKTENQKVCLGKSGIHGWGLFARRDLEEGEMVVEYRGEQLRRSITDLREAQYRSEGXD

SEQ ID NO: 32538 - protein, 685 aa, Glycine max
  unsure (1)..(685): unsure at all Xaa locations
  Clone ID: TF_GmC67530_1.pep
APTRPYGCEKTTEGGLNKEVPNIVSEFVGGTSLEIQERYKTIKEKNIGRLDQPSQNSGEYESTIGICVEKTLSAALDSFDNLFCRRCLIFDCRLHGCSQPLIYHSEKQTVWSDPEGDRKPCSDQCYLQLKVVKNVTEDSTSGSDQNKRTTITEEADVILAPSIIEEPSNQSIVPFPTEVDCLGSLNLNVPISGTREKWKVPNQSDTALRDSSLPPDDSQHSYKKLKTISDDVVTANSDSSKNINFGACDESIHTITSGLLDKSVKDNSNKLIDSSSTCCSDEQDKSIGDGPKDPTNKTEFKKLSNSMEGKVDGMLRXSDWKPLEKELYLRGVEMFGRNSCLIARNLLSGLKTCMEISSYMHSGGVSMPHGSTVAPSSIMEEKGKFDAECTDQEMPSRSRLLRKRGKTRKFKYSWKSAGHPSIWKRIADGKNQSCKQYTPCGCQSMCGKECTCINGGTCCEKYCGCSKSCKNRLRGCHCAKSQCRSRQCPCFAAGRECDPDVCRNCWVSCGDGSLGEPPRRGEGQCGNMRLLLRQQQRILLAKSDVAGWGAFLKNPVNKNDYLGEYTGELISHREADKRGKIYDRANSSFLFDLNDQYVLDAYRKGDKLKFANHSSNPNCYAKVMLVAGDHRVGIFAKEHIDASEELFYDYRYGPDQAPPWARKPEGSKRDESTAPQGRAKKHQSH

SEQ ID NO: 32539 - protein, 73 aa, Glycine max
  Clone ID: TF_LIB4164-031-R1-N1-A11.pep
KGNIARLINHFCMPNCFARIVPLSDQENRIVFIAKTNVSAGEELTYNYSFDDERDEKKVVCPCKAPNCSGFMN

SEQ ID NO: 32540 - protein, 333 aa, Glycine max
  Clone ID: TF_GmC387_1.pep
RADSARDVFQYINCEDGKMSGPPGDVANSLMDGYSKGNNEVRRRSRFLRRRGRVRRLKYTWKSAAYHSIRKRIPQKGDQPCRQYNPCGCQTACGKQCPCLQNGTCCEKYCGRPKSCKNRFRGCHCAKSQCRSRQCPCFAADRECDPDVCRNCWVSCGDGTLGIPSQRGDNYECRNMKLLLKQQQRVLLGRSDVSGWGAFLKNSVGKHEYLGEYTGELISHREADKRGKIYDRENSSFLFNLNDQFVLDAYRKGDKLKFANHSPDPNCYAKVIMVAGDHRVGIFAKERICAGEELFYDYRYEPDRAPAWARKPEASGSKKEDGAPSSGRAKKLA

SEQ ID NO: 32541 - protein, 62 aa, Glycine max
  Clone ID: TF_GmC312266_1.pep
ANEENNQSYLHVAFFALRHIPPMTELTYDYGLAQSDHAEGSSAAKGRKKCLCGSSKCRGSFG

SEQ ID NO: 32542 - protein, 845 aa, Glycine max
  Clone ID: TF_GmC6450_1.pep
SKENRLLSERKHRNNETHGGLDNGDYASDRESRRRLSKLNKKYFNSESETSDDCDRSSVDGKSDSDTTTTDIESDQDVYSENGIGDSRGDVYFTPDDGLDFITDEREWGARMTKASLVPPVTRKYDVIDQYIIVADEEDVRRKMRVSLPDGYAEKLSVQKNGIDESDMELPEVKDYKPRKQLENEVVEQEVYGIDPYTHNLLLDSMPKELDWSLQEKHLFVEDKLLRMLNKQVNHFTGTGNTPMSYPLQPAIEEIERYAEEQCDVRTVRMCQGILKAIASRPDDKYVAYRKGLGVVCNKEEGFAEDDFVVEFLGEVYPVWKWFEKQDGIRSLQKDSKDPAPEFYNIYLERPKGDADGYDLVVVDAMHMANYASRICHSCRPNCEAKVTAVDGQYQIGIYSLREIQHGEEITFDYNSVTESKEEYEASVCLCGSQVCRGSYLNLTGEGAFEKVLKEWHGILDRHYLMLEACELNSVSEEDYNDLGRAGLGSCLLGGLPDWLVSYAARLVRFINFERTKLPEEILKHNLEEKRKYFSDIILEVERSDAEVQAEGVYNQRLQNLAVTLDKVRYVMRCIFGDPRKAPPPLEKLSPEATVSFLWKGEGSFVEELLQCITPHVEEGILNDLKFKIHAHDPSNSGDIQKELRKSLLWLRDEVRNLPCTYKCRHDAAADLIHIYAYTKYFFRIQDYQTITSPPVYISPLDLGPKYADKLGAGFQEYRKIYGENYCLGQLVFWHNQSNAEPDCTLARISRGCLSLPDISSFYAKAQKPSRHRVYGPRTVRSMLARMEKQPQKPWPKDRIWSFKNSPKFFGSPMLDAVINNSPLDREMVHWLKHRPAIFQAMWDQ

SEQ ID NO: 32543 - protein, 193 aa, Glycine max
  Clone ID: TF_GmC477_2.pep
MPALHLVRGKPLIFECGPFCSCPPHCRNRVAQKGLKYRLEVFRSKQTSWGVRSLDLIQAGSFICEFAGVVLTREQAQLLTMNGDSLIYPNRFSERWAEWGDLSQIYPDYVRPLYPSIPPLDFSLDVSTMRNVACYMSHSSTPNVLVQFVLHDHNNLMFPHLMLFAMENIPPMRELSLDYGVADEWTGKLSICN

SEQ ID NO: 32544 - protein, 282 aa, Glycine max
  Clone ID: TF_GmC27513_1.pep
MSAFDVSGVSRPRADVNLLQSETEGIDDEKIGFYGRCTLHIIEPRCLPIYDPLDEIGSQEEKEFTCARAEGYKGRRWDGFQNNQCQGGCLVPEEQLNAWIHINGQKLCSRGLPKFPDLDIEHDCRKEYARYKQAKGWKHLVVYKSRIHALGLYTSRFISRGEMVVEYIGEIVGLRVADKREKEYQSGRKLQYKTACYFFRIDKEHIIDATRKGGIARFVNHSCLPNCVAKVITVRHEKKVVFLAERDIFPGEEITYDYHFNHEDEGKIPCYCNSKNCRRYMN

SEQ ID NO: 32545 - protein, 294 aa, Glycine max
  Clone ID: TF_GmC121298_1.pep
FVNIAIQLVYLWKNSFSLILVAKETRYEPPPNPSGCARSEPYDYFGRRGRKEPEALAAASLKRLFVENQPYLVGGYSRHGSLNNLEPSGRGVCSKFFCSQQRLRTSRIDTSNSILSISEKYTYMRETFRKRLAFGKSRIHGFGIFAKHPYKGGDMVIEYTGELVRPPIADRREHFIYNSLVGAGTYMFRIDDERVIDATRAGSIAHLINHSCAPNCYSRVISVNGDEHIIIFAKRDIKQWEELTYDYRFFSIDERLACYCGFPKCRGIVNDTEAEERAATLYAPRSELIDWRGE

SEQ ID NO: 32546 - protein, 296 aa, Glycine max
  Clone ID: TF_GmC1138_1.pep
SSSTSSRTGIILADLSTGVESIPVSLVNEVDNGWGPSFVSVCQSPWAPQPFRCAQSASGCNCNKTCVPGDLSCSCIQRNEGDFPYTANGVLVSRKPLVHECGPLCKCSPNCKNRVSQTGLKHQMEVFKTKDRGWGLRSLDPIRAGTFICEYAGEVIDVAKVNKNRGYDDEYVFDTSRIYDTFKWNYEPSLLEEISSNVSSEDYDIPSPLIISSKKFGNVARYMNHSCSPNVFWQPVLYAENNQSFLHIAFFALRHIPPMTELTYDYGCSGHADGSSAPKGRKKCSCGSSKCRGSFG

SEQ ID NO: 32547 - protein, 499 aa, Glycine max
  unsure (1)..(499): unsure at all Xaa locations
  Clone ID: TF_GmC6450_2.pep
PKGDADGYDLVVVDAMHMANYASRICHSCRPNCEAKVTAVDGQYQIGIYSLREIQHGEEITFDYNSVTESKEEYEASVCLCGSQVCRGSYLNLTGEGAFQKVLKDSHGILDRHCLMLEACELNSVSEEDYNDLGRAGLGSCLLGGLPDWLVAYAARLVRFINFERTKLPEEILKHNLEEKRKYFSDIILEVERSDAEVQAEGVYNQRLQNLAVTLDKKLHXVRYVMRCIFGDPRKAPPPLEKLSPEATVSFLWKGEGSFVEELVQCITPHVEEGILNDLKFKIHAHDPSNSGDIQKELRKSLLWLRDEVRNLPCTYKCRHDAAADLIHIYAYTKYFFRIRNYQTITSPPVYISPLDLGPKYTNKLGAEFQEYRKIYGENYCLGQLIFWHNQSNADPDRSLARASRGCLSLPDTNSFYAKAQKPSRHCVYGPRTVRSMLARMEKLPQRSWPKDRIWSFKSSPKFFGSPMLDAVVNNSPLDREMVHWFKHRPAIFQAMWDR

SEQ ID NO: 32548 - protein, 155 aa, Glycine max
  Clone ID: TF_GmC1246_2.pep
RNQNPELTCIGSVFNMLGKELGEPVDFELPDSFNKSKPMQYTYIKRNIYLTKKVKRSRFDDDGIFCSCTPSPGSTSVCGRDCHCGMLLSSCSSGCKCGSSCLNKPFQNRPVKKMKLVKTEKCGSGIVADEDIKLGEFVIEYVGEVMIGQWIDCFC

SEQ ID NO: 32549 - protein, 198 aa, Glycine max
  Clone ID: TF_GmC91094_1.pep
GKKGYGLKAIENVAQGQFLIEYVGEVLDMQAYEARQREYALKGHRHFYFMTLNGSEGTDASAKGNLGRFINHSCDPNCRTEKWMVNGEICIGLFALRDIKKDEELTFDYNYVRVFGAAAKKCYCGSPNCRGYIGGGDPLNAELIVQSDSEEEFTEPVMLTKDGEIEDSVPTPEYSNNVDTQSAKHMLKDRDILDNSTT

SEQ ID NO: 32550 - protein, 134 aa, Glycine max
  Clone ID: TF_LIB4367-007-R1-K1-A4.pep
AFCEFLLWDMIYRGVQNFYMCEIRKDFTVDATFKGNTSRFLNHSCDPNCVLEKWQVDGETRVGVFAACSIEAGEPLTYDYRFVQFGPEVKCHCGAANCQGFLGTKKKIGKLDLYWGSKRMRTSKASCITLVTAV

SEQ ID NO: 32551 - protein, 98 aa, Glycine max
  unsure (1)..(98): unsure at all Xaa locations
  Clone ID: TF_LIB4203-002-R1-N1-B11.pep
DEAARRGKVYXKYMCSFLFNLNNDFVVDATRKGNKICFANHSVNPNCYAKVMMVNGDPRIGIFAKRAIQTGEELFFDYRYSQADALKYVGIEREMEIP

SEQ ID NO: 32552 - protein, 200 aa, Glycine max
  unsure (1)..(200): unsure at all Xaa locations
  Clone ID: TF_GmC138311_1.pep
MRGRFPYDENGRIILEEGYLVYECNHMCRCNKSCPNRVLQNGVRVKLEVFXTEKKGWAVRAGEAILRGAFVCGYIAEVLDVQEARDRRKRYGAEHCSYLYDIDARVNDMGRLAREQAQYVIDATKFGNVSRFINHSCSPNLVNHQVLVESMDCERAHIGFYASRDIALGEELTYDYQYELMPGEGSPCLCESLKCRGRLY

SEQ ID NO: 32553 - protein, 162 aa, Glycine max
  Clone ID: TF_GmC195940_1.pep
KETFVCEYVGEILPIMELYKRIMQDTGTKKHTYPVTLDADWGSEQGLKDEEALCLDATKNGNVGRFINHRCYDANLIDIPVEIESPDHHYYHLAFFTNRTVSANEELTWDYGIDFDDHDHPIKAFRCCCGSVFCCDKKQKGKGKIENQINVTRGMSELKQLE

SEQ ID NO: 32554 - protein, 215 aa, Glycine max
  unsure (1)..(215): unsure at all Xaa locations
  Clone ID: TF_GmC195137_1.pep
GAIVQAKPLVYECGPTCKCPSTCHNRVSQLGIKFQLEIFKTDTRGWGVRSLNSIPSGSFICEYIGELLEDKEAEQRTGNDEYLFDIGNNYXVEARGNSTLWDDLXTLTTLMPDAHTASCEVVKDGGFTIDAAQFGNLGRFINHSCSPNLIAQNVLYDHHDTRMPHIMFFAADNIPPLQELTYDYNYEIDQVRDSDGNIKKKYCYCGSVDCTGRMY

SEQ ID NO: 32555 - protein, 557 aa, Glycine max
  unsure (1)..(557): unsure at all Xaa locations
  Clone ID: TF_GmC270_1.pep
LKVNRTLRLWHLYCPHFLRVGAKRCGKAEAERKAAKKASLKPSKLKKGAPPEESKTTAKRPDLKAVSKMMENNEILYPEKRIGNIPGIEVGYQFYSRAEMVAVGFHSHWLNGIDYMGRSYAKAFCYELKIAEASHISGMYGEDLDNAXPNEYTGHGGHSLTGDKRQFRDQKLERGNRCLMXCXEGFVLWRVIRDQDSSSSYTGKVYTYDGLYKVVNYWAGKGISGFTVYKFRLRRLEGQPTLTTNQVYFTYGRVPQSLTEIQGLVCEDITGGQEDMPIPATNLVDDPPVPPTDFTYCKSLKVAKNVKLPMNATGCKCEGICNDPTSCACALRNGSDFPYVSRDGGRLIEAKDVVFECGPKCGCGPGCVNRTSQRGLRYRLEVFRTAKKGWAVRSWDFIPSGAPVCEYTGILARAEDMDSVLENNYIFEIDCLQTIKGLGGRERRSQDGEIPANLLDKYHDQCSESVPEFCIDAGSTGNIARFINHCCEPNLFVQCVLSTHDDLRLARIMLFAADNIPPLQELTYDYGYVLDSVLDSDGKIKQMPCYCGASVCRKRLF

SEQ ID NO: 32556 - protein, 707 aa, Glycine max
  unsure (1)..(707): unsure at all Xaa locations
  Clone ID: TF_GmC793_1.pep
MEHHFGQGTTPASESFDKARVLNVKPLRTLVPVFPSPSNPASSSTPQGGAPFVCVSPSGPFPSGVAPFYPFFISSESQRLSEQNAQTPSGQRVPAAPVSTAVPINSFRTPTGAANGDVGSSQKNTRSRGWVTEEDGYSNVEIEEIDADEGTGTGRSKRKSNKKTKARQSGGSVSVDVDPDAVAADILKSLNALVFDVLSQPEGSRDSVAYTLMIYEVMRRKLGQIEDSNRAANSGAKRPDLKAGAIMMNKGIRTNSKKRIGVVPGVEIGDIFFFRFELCLVGLHAPSMAGIDYIGKTSQEEEPLAVSIVSSGGYEDNVEDGDVLIYSGQGGVNRDKGASDQKLERGNLALEKSAHRGNEVRVIRGLRDPQHPTGKIYVYDGLYKIQNSWVEKAKSGFNVFKYNLVRLPEQPQAYMIWKSIQQWTEKSASRAGVILPDLTSGAENVPVCLVNDVDNEKGPAYFTYIPTLKNLRPTAPVESSTGCPCVGGCQSKNFNCPCIQKNGGYLPYSSALLLADLKSVIYECGPSCQCPSNCRNRVSQSSLKFRLEPFRSTNKGWGLRSWDSIRAGTFICEYAGEVIYIAKPKKLGGDNANYLIFDSTHIYLQLEVFPDDTDSSXKFPSPLYISAKNEGNVSRFRNHSCSPNVLWRPVIRENKNESDLHIAFYAIRHIPPMMELTYDYGTVLPLKVGQRKKKCLCGSVKCKGYFC

SEQ ID NO: 32557 - protein, 378 aa, Glycine max
  Clone ID: TF_GmC88400_1.pep
MIKGKKDTTSKGKSSVSVNSSSHNDQLSLKNKAGQKVLKFSGEVQNDVKDFVKSNVKKLSASTDNSVVMKKIVKSDGTVKEKVTSHCSREIQNATMKVSKSKRKHQMDGTASSHPTKVLKISNGGAYLGASKQVTVASRKSAKSKPLNLCPRSDGCARTSIDGWEWHKWSRSASPAYKARVRGLPCVQNKCIDSENNLSQLSNGKGLSARTNRVKLRNLLAAAEGADLLKVPQLKARKKHLRFQRSKIHDWGLLALEPIEAEDFGIEYIGELIRPRISDIRERQYEKMGIGSSYLFRLDDGYVVDATKRGGIARFVNHSCEPNCYTKVISVEGQKKIFIYAKRHIAAGEEITYNYKFPLEEKKIPCNCGSRKCRGSLN

SEQ ID NO: 32558 - protein, 347 aa, Glycine max
  unsure (1)..(347): unsure at all Xaa locations
  Clone ID: TF_GmC477_1.pep
REFGLIRLEGMKYEGSAAGSGKVYVYDGVYRIVDCWFDVGRSGFGVYKFKLWRIEGQAKMGSAILKEARNVRRSELDLNPTSXDVSNRKENVAVRLFNDIDANYDPLQYEYLVKTNFPQFVFHQSGRGTGCECADGCVEGCFCAMKNGGDFPYNQSGILLRGKPLVFECGPFCRCPPHCRNRVTQKGLKNRLEVFRSRETGWGVRSMDLIQAGAFICEYTGVVLTREQARLLTMNGDSLIYPNRFTDSWAEWGDVSLIDSNFVRPSYPSIPPLDFAMDVSRMRNVACYMSHSSTPNVLVQFVLYDHNNLMFPRLMLFAMESIPPMRELSLDYGVADEWTGKLSICNE

SEQ ID NO: 32559 - protein, 395 aa, Glycine max
  unsure (1)..(395): unsure at all Xaa locations
  Clone ID: TF_GmC276_2.pep
SWVCKACETPDIKRECCLCPVKGGALKPTDVDTLWVHVTCAWFRPEVSFASDEKMEPALGILSIPSNSFVKICVICKEIHGSCTQCCKCSTYFHAMCASRAGYRMELHCMEKNGKQTTKMVSYCAYHRAPNPDTVSIMQTPLGVISTKSLLQTKRKAGSRLISSKRIKVEDTSPAENTRHEPFSXARCRIYRRTNHTKKRAAGEAIAHHVRGHYHHPLDAIQSLNADRMVDKPPAFSSFRERLHHLQRTENERVCFGXRSGIHGWGLFARQNIQEGEMVLEYRGEQVRRSIADLREXRYRLEGKDCYLFKISEEVVVDATDKGNIARLINHSCMPNCYARIMSVGDDESRIVLIAKTDVSTGDELTYDYLFDPDEPDEFKVPCLCKASNCRKFMN

SEQ ID NO: 32560 - protein, 142 aa, Glycine max
  unsure (1)..(142): unsure at all Xaa locations
  Clone ID: TF_GmC230545_1.pep
MDPHTEELPQYIHINQNEFCIRRHKKQKEEDIAICECKYDADDPDNACGDSCLNVLTSTECTPGYCHCDILCKNQKFQKCEYAKTKLFKTEGRGWGLLADEDIKAGQFVIEYCGQGIXWKEAKRGCQAYENEGLKDAFIIFL

SEQ ID NO: 32561 - protein, 78 aa, Glycine max
  Clone ID: TF_17020590.pep
ARFINHSCDPNLFVQCVLNSHYGVKQARLVLFAGRNIRPKQELTYDYGYRLDSVVDADGKIKQLPCYCGEATCRKRLY

SEQ ID NO: 32562 - protein, 425 aa, Glycine max
  Clone ID: TF_GmC143160_1.pep
MDSSSQMLSAEDNKISPKTFDQKIIESSQTFMKDIKPKTSSQASHTMLSEVEKISNLPRVAAKDRKSYPENASSAVEKELVKPRTKKLKMQLASTNHIGLPDASDEKLCLKPLSTQDQDMESKDDVISACDRNTPAYNGNITIASSSRLGEVKISLNCDSALGQPNFSIPNLDIVMKFMDKKYIRSCNAVEPQFSMAKLLDDLCRIYLKLGYRKGSNSKRANLQQYVNQGERNPFRFISDITKGSEKVKISLIDETGSEDLPKFNYIPCNITYQSANVNISLARISDEGCCSDCSGNCLSSPLPCACAQETGGEFAYTPHGLLKEEFLTACVSMKNEPQDHHYVYCQECPLEKSKNEYMPERCKGHMVRKFIKECWRKCGCDMQCGNRIVQRGIACKLQVFSTREGKGWGLRTLEDYPKGTLYVI

SEQ ID NO: 32563 - protein, 102 aa, Glycine max
  unsure (1)..(102): unsure at all Xaa locations
  Clone ID: TF_LIB3049-034-Q1-E1-G9.pep
RGTYRCRIDDXRVIVATRAGSIAHLIKQSCARNCYSRVMSVNGYQHNTIFAMRDIKXWEELTYDDRIFSIDERRPCYCGFPKCLSILNDTDAEERAATLYAP

SEQ ID NO: 32564 - protein, 334 aa, Glycine max
  unsure (1)..(334): unsure at all Xaa locations
  Clone ID: TF_GmC78230_1.pep
IMLPRKKEIXIYANMTEHQKNLQDHLVNKTLGNYLKENMSSGLSVPAIMIRNLAIQLRKVCNHPDLLESAFDDSYLYPPLEEIVGQCGKFHLLDRLLQRLFSRNHKVLIFSQWTKVLDIMDYYFSEKGFAVCRIDGSVKLEERKQQIQDFNDVNSNCRVFLLSTRAGGLGINLTVADTCILYDSDWNPQMDLQAMDRCHRIGQTKPVHVYRLSTAQSIEGRMLKRAFSKLKLEHVVIEKGQFHQERTKPASMDEIEEDDVLALLRDEETAEDKKIHTDISDEDLEKLLDRSDLIVNDSNDDNFKAPVSAFPLKGPGWEVVIPTATGGMLSTLNC

SEQ ID NO: 32565 - protein, 247 aa, Glycine max
  Clone ID: TF_GmC636412_1.pep
TIKNKISLAELFDSNRGQLNEKRILNLMNIVIQLRKVCNHPELFERSEGSTYLYFGEIPNSLPPPPFGEMEDVYYSGGHNPISYEIPKLVYQEIIQSSETLSSAVGPVVSRESFHKHFNIFRPENVYRSVFSEDMYSKSGNFGFTHMMDLSPQEVTFLATGSFMERLLFSMMRWEQKFIDEAVDFLTETIDDDPECSYLEKEKVRAVTRMLLVPSRSETLVLQKKFQTGPSHAPFEALVVPHQDRVL

SEQ ID NO: 32566 - protein, 205 aa, Glycine max
  unsure (1)..(205): unsure at all Xaa locations
  Clone ID: TF_uC-gmroLIB3259P248f08b1.pep
QLLKETEKYLQKLGSKLQEAKTAAGRFGQDVDETGNVSFLENSETENVDESDQAKHYMESNEKYYKMAHSIKESIAEQPSSLLGGKLREYQMNGLRWLVSLYNNHLNGILADEMGLGKTVQVISLICYLMEAKNDRGPFLVVVPSSVLPGWDSEINFWAPXVHKXVYAGPPEERRRLFKERIVHQKFNVLLTTYEYLMNKHDRPK

SEQ ID NO: 32567 - protein, 53 aa, Glycine max
  unsure (1)..(53): unsure at all Xaa locations
  Clone ID: TF_700978727H1.pep
XASXVVWXLPFXXALXAXRXRLSXCQKPLXEXXXKATTVPSXHSAXVFLXXAG

SEQ ID NO: 32568 - protein, 258 aa, Glycine max
  Clone ID: TF_LIB4164-006-Q1-K1-F3.pep
PEFPRSTHASDWPVIPYTDVHLEFVRRVTIDHVETYTVLLSGIFDGPDEGVTGLLHLASLKFVTLRPVLGARLSEEISSLRIRVEVLKSAFDACESLLDSSRQLWKKSMVNVMSWLRPEIMTSEVRYGFGTCMKMEVDPQIEMADDTCKARKHARFDPAGFCEAIKPSKSEPMLKDDIPELLPKLRPYQRRAAFWMVEREKAVEESRGERERNLFHSPLCIPVDFLDTSSQISQMFFNPFSGSISLWGLGKTVELLAC

SEQ ID NO: 32569 - protein, 139 aa, Glycine max
  unsure (1)..(139): unsure at all Xaa locations
  Clone ID: TF_uC-gmflminsoy021g09b1.pep
HASAHASADAWEECSVCTHSSVRHFCWWNKYVATPIQSYGNGDAGKRAMILLKHKVLKNIVLRRTKIGRAADLALPPRIVSLRRDCLDIKEQDYYESLYNESQAQFNTYIEANTLMNNYAXHIFDLLTRLRQAVDHPYL

SEQ ID NO: 32570 - protein, 420 aa, Glycine max
  Clone ID: TF_GmC1170_1.pep
LIVLSQNGGSNRGGFNIVSSSAKSSIHLDGLFNIISYDLVPKLQNMLMTCNFKVVIADESHFLKNAQAKRTTASLPVIKKAQYALLLSGTPALSRPIELFKQLEALYPDVYRNVHEYGNRYCKGGFFGVYQGASNHEELHNLIKATVMIRRLKKDVLSQLPVKRRQQVFLDLAGKDMKQINALFRELEMVKAKIKAAKSQEEAESLKFAQKNLINKIYTDSAEAKIPSVLDYVGTVIEAGCKFLIFAHHQPMIDSIHEFLLKKKVGCIRIDGSTPAASRQQLVTDFQEKDSIKAAVLSIKAGGVGLTLTAASTVIFSELSWTPGDLIQAEDRAHRIGQVSSVNIYYLLANDTVDDIIWDVVQNKLENLGQMLDGHENALEVSASLPVNSPSKQKTLDQFVRRCDNTDGLEYEPNPKRPRN

SEQ ID NO: 32571 - protein, 47 aa, Glycine max
  Clone ID: TF_7795170.pep
IESTYERALIGTPLQNHVGELFSLIRFLLFTPYSYYLCMDCDCLIFD

SEQ ID NO: 32572 - protein, 133 aa, Glycine max
  Clone ID: TF_GmC157_5.pep
SKQAKKKKREVTKGKTKKSDSKISKSSNTKKEEEMWMDEEDLDAPVRSDRSILHAVKWQRIILDEAHYIKSRHCNTAKAVLALESTYKWALSGTPLQNRVGELYSLIRFLQITPYSYYLCKDCDCRILDHSTK

SEQ ID NO: 32573 - protein, 493 aa, Glycine max
  unsure (1)..(493): unsure at all Xaa locations
  Clone ID: TF_GmC1248_1.pep
CSLRAKRRWCLSGTPIQNTIDDLYSYFRFLKYDPYAVYKSFYNTIKVPISKSTIQGYKKLQAVLRAIMLRRTKGTLLDGKPIINLPPKTIELSKVDFSIEERAFYTKLESDSRLQFKAYAAAGTVSQNYANILLXLLRLRQACDHPLLVKDFDSDPVGKDSVEMAKNLPRDMLINLFNCLEATFAICLVCNDPPEEPVITMCGHVFCYQCVSEYLTGDDNMYPSVNCKELIGDDLVFSKATLRSCISDDGGSLSSANSHLCDYSLVQQRDYTSSKIKAVLEVLQSNCKLKISSSDLLNSSGGCRDSPSSDNLYVEDCDSDVRVTKHTIKYSESTTEGPIKAIVFSQWTSMLDLVETSLRQFSIQYRRLDGRMTLGARDKAVKDFNTEPEIAVMLMSLKAGNLGLNMVAACHVILLDLWWNPTTEDQAIDRAHRIGQTRPVTVTRITIKDTVEDRILALQEDKRKMVASAFGEDHAGGTGTRLTVDDLKYLFMV

SEQ ID NO: 32574 - protein, 218 aa, Glycine max
  unsure (1)..(218): unsure at all Xaa locations
  Clone ID: TF_GmC154492_1.pep
GSLEEFQEEFKDINQEEQISRLHKMLAPHLLRRVKKDVMKELPPKKELILRIELSSKQKEYYKAILTRNYQILTRRGGAQISLINVVMELRKLCCHPYMLEGVEPDIDDAKEAFKQLLESSGKLQLLDKMMVKLREQGHRVLIYSQFQHMLDLLEDYCAYKNWQYERIDGKVGGAERQVRIDRFNAKNSSRFCFLLSTRAXGGLEINLATADTAIIYD

SEQ ID NO: 32575 - protein, 802 aa, Glycine max
  unsure (1)..(802): unsure at all Xaa locations
  Clone ID: TF_GmC1755_1.pep
GARGTNEKPVTMSIESVNDPQTLINNIQVVRSVAPVLNEELKPKLLTLLPCIFKCVQHSHVAVRLAASRCITSMAQSMTVKVMGAVVENAIPMLEDASSVYARQGAGMLISFLVQGLGVELVPYAPLLVVPLLRCMSDCDQSVRQSVTHSFAALVPLLPLARGLPQPIGLGEGVSRNAEDLQFLEQLLDNSHIEDYKLCTELKVTLRRYQQEGINWLAFLKRFKLHGILCDDMGLGKTLQASAIVASDIAEHRTSIGNEDLLPSLIICPSTLVGHWAFEIEKYIDVSVISSLQYVGSAQERMLLRDHFCKHNVIITSYDVVRKDIDFLGQLLWNHCILDEGHIIKNAKSKVTLAVKQLKAQHRLILSGTPIQNNIMDLWSLFDFLMPGFLGTERQFQATYGKPLLAARDPKCSARDAEAGALAMEALHKQVMPFLLRRTKDEVLSDLPEKIIQDRYCDLSPVQFKLYEQFSGSRAKQEMSSVVTTNESAAAEGSSSSTKASSHVFQALQYLLKLCSHPLLVIGEKIPESLSTILSELFPAGSDVISELHKLYHSPKLVALHEILEECGIGVDNSGSEGAVNVGQHRVLIFAQHKAFLDIIERDLFHTHMKSVTYLRLDGSVEPEKRFEIVKAFNSDPIIDVLLLTTHVGGLGLNLTSADTLVFVEHDWKLMRDHQXMDRAHRLGQKKVVNVHRLIMRGTLEEKVMSLQRFKVSVANAVINSENASMKTMNTDQLLDLFASAETSKKGASVVKSPENNSDGDAKLVGSGKGLKSILGGLEELWDQSQYTEEYNLSLFLARLNG

SEQ ID NO: 32576 - protein, 88 aa, Glycine max
  Clone ID: TF_701101675H1.pep
LQDISQPKTEYDLPAGVLSVSLLRHQKIALAWMLQKETKSLHCLGGILADDQGLGKTISMISLILAQRTLQSKSKIDDTCSHKTEALN

SEQ ID NO: 32577 - protein, 147 aa, Glycine max
  unsure (1)..(147): unsure at all Xaa locations
  Clone ID: TF_GmC129655_1.pep
ACRRCVDLGLRTVLIVTPVNVLHNWRQEFIKWRPSELKPLRVFMLEDLSRDIRAQLLAKWRSKGGVFLIGYAAFRNLSFGKHVKDLHMAIXICHALHDGTDILVCDEAHMIKNTNDDVTXALKQVKCQRRIALTGSPIQNNLMEYHC

SEQ ID NO: 32578 - protein, 142 aa, Glycine max
  Clone ID: TF_7589119.pep
RVLHNYASILELLLRLRQCCDHPFLVMSRGDTQEFADLNKLAKRFLRGTYTASEGEVKDTPSRAYVQEVVEELRKGEQGECPICLEVFEDAVLTPCAHRLCRECLLSSWRNATSGLCPVCRKTISRLDLITAPTENRFQVDI

SEQ ID NO: 32579 - protein, 177 aa, Glycine max
  Clone ID: TF_GmC423697_1.pep
LKKQQKEFQHYTQSPVFLSEGTLHPYQLEGLNFLRFSWSKQTHVILADEMGLGKTIQSIAFLASLFKEGVSPHLVVAPLSTLRNWEREFATWAPHMNVLMYVGSAQARSVIREYEFYFPKKQKKIKKKKSGHLISESKQDRIKFDVLLTSYEMINFDTASLKPIKWECMIVDEGHRL

SEQ ID NO: 32580 - protein, 135 aa, Glycine max
  unsure (1)..(135): unsure at all Xaa locations
  Clone ID: TF_GmC131581_1.pep
MTIALILSXPGRGNSENNDVENGDDNFITNKRKNANTLHKFEGGTLIVCPMALLSQWKDELETHSKEGSISIFVHYGGARTTDPWMISGHDVVLTTYGVLQAAYKNDGENSIYNKVKWYRVVLDEAHNIKAHRNQ

SEQ ID NO: 32581 - protein, 172 aa, Glycine max
  Clone ID: TF_GmC2542_21.pep
AREAAMAVQGKMVDSQRKKSKASLRKLEKQPEWLKGGELRDYQLEGLNFLVNSWRNDTNVILADEMGLGKTVQSVSMLGFLQNAQQIHGPFLVVVPLSTLSNWAKEFRKWLPDMNIIIYVGTRASREVCQQYEFYNEKKPGKPIKFNALLTTYEVVLKDKAVLSKIKWNYLM

SEQ ID NO: 32582 - protein, 389 aa, Glycine max
  unsure (1)..(389): unsure at all Xaa locations
  Clone ID: TF_GmC189298_1.pep
GKHKVENELPEKIERLIRCEASSYQKLLMKRVEENLGAIGNSKARSVHNSVMELRNICNHPYLIQFHAKEVDNFIPKHYLPPIIRLCGKLEMXDRLLPKLKATDHRVLFFSTMTRLLDVMEEYLTSKQYRYLRLDGHTSGGDRGALIELFNQPGSPYFIFLLSIRAGGVGVNLQAADTVILFDTDWNPQVDLQAQARAHRIGQKRDVLVLRFETVQTVEEQVRASAEHKLGVANQSITAGFFDNNTSAEDRREYLESLLRECKKEEVAPVLDDDALNDLLARSETELDIFEAVDKERKEDELATWKKLVLGQAADGSDSDIPPLPARLVTDEDLKQFYEAMKISDVPKAEVESSGVKRKGGYIGGLDTQHYGRGKRAREVRSYEEQWTE

SEQ ID NO: 32583 - protein, 558 aa, Glycine max
  unsure (1)..(558): unsure at all Xaa locations
  Clone ID: TF_GmC300_1.pep
EDSGFKPLLKPYQLVGVNFLLLLYRKGIGGAILADEMGLGKTVQAITYLTLLKHLHNDSGPHLIVCPASVLENWERELKRWCPSFSVLQYHGAGRAAYCKELNSLSKAGLPPPFNVLLVCYSLFERHSAQQKDDRKILKRWRWSCVKKAGIRXLLFSSPWRRXNLMSVRENDGRGLMLQXIELKMRSXEKQFKLESLHSYIFNLEDVDLKKLQNAEDGDLCGRMKSILGPFILRRLKSDVMQQLVPKIQQVEYVIMEKQQETAYKEAIEEYRAVSQARMEKCSNLNSKSVLEVLPRRQINNYFVQFRKIANHPLLIRRIYNDEDVIRFARKLEKTTEGGFECTLDRVIEELKNYNDFCIHRLLLHYGVNDRKGILPDKHVMLSAKCRALAELLPSLKEGGHRALIFSQWTSMLDILEWTLDVIGLTYKRLDGSTQVAERQTIVDTFNNDTSIFACLLSTRAGGQGLNLTGADTVVIHDMDFNPQIDRQAEDRCHRIGQTKPVTIYRLVTKGTVDENVYEIAKRKLVLDAAVLESMEEINEGDMPEKTMGEILSAILLS

SEQ ID NO: 32584 - protein, 529 aa, Glycine max
  unsure (1)..(529): unsure at all Xaa locations
  Clone ID: TF_GmC300_2.pep
DVLPRRSSDSLGPYGARKGLGKTVQAITYLTLLKHLHNDSGPHLIVCPASVLENWERELKRWCPSFSVLQYHGAGRAAYCKELNSLSKAGLPPPFNVLLVCYSLFERHSAQQKDDRKILKRWRWSCVIMDEAHALKDKNSFRWKNLMSVARNANQRLMLTGTPLQNDLHELWSLLEFMLPDIFASEDVDLKKLLNAEDRDLIGRMKSILGPFILRRLKSDVMQQLVPKIQQVEYVIMEKQQETAYKEAIEEYRAVSQARMEKCSNLNSKSVLEVLPRRQINNYFVQFRKIANHPLLIRRIYNDEDVIRFARKLHPIGAFGFECTLDRVIEELKNYNDFCIHRRWHDYMLRLSYSMDNXALAELLPSLKEGGHRALIFSQWTSMLDILEWTLDVIGLTYKRLDGSTQVAERQTIVDTFNNDTSIFACLLSTRAGGQGLNLTGADTVVIHDMDFNPQIDRQAEDRCHRIGQTKPVTIYRLVTKGTVDENVYEIAKRKLVLDAAVLESMEEINEGDMPEKTMGEILSAILLS

SEQ ID NO: 32585 - protein, 113 aa, Glycine max
  Clone ID: TF_GmC128210_1.pep
MCQDLSSRNPNQNMNLLVPAKGRPSAGTLIVCPTSVLRQWAEELHNKVTCKAKLSVLVYHGSNRTKDPYELAKYDVVLTTYSIVSMEVPKQPFVDKDDEEKGTYDDHAISSKK

SEQ ID NO: 32586 - protein, 191 aa, Glycine max
  Clone ID: TF_7685168.pep
ASADDEDALVDSSDVMPDEEVDPEEAELKKEALKAAQEAVSKQRMLTSAFDTECLRLRQAGETDSLPPDVAGASNIDLQTPSTMPVASTVRTPELFKGVLKEYQLKGLQWLVNCYEQGLNGILADEMGLGKTIHAMAFLAHLAEEENIWGPFLVVAPASVLNNWNEELERFWPALKRLPYWGGLSDRTGLW

SEQ ID NO: 32587 - protein, 206 aa, Glycine max
  Clone ID: TF_LIB4167-054-R1-K1-B3.pep
RKAKKAVAAMLTRSKESEKTEDMNMTEEERVEKEQKELMPLLTGGKLKNYQLKGVKWLISLWQNGLNGILADQMGLGKTIQTIGFLSHLKAKGLDGPYMIIAPLSTLSNWVNEISRFAPSLPAVIYHGDKKQRDDIRRKHMPTRTIGPQFPIVITSYEIALNDAKRYFRSYNWKYLVVDEGHRLKNSQCKLVKALKFINVENKLLF

SEQ ID NO: 32588 - protein, 832 aa, Glycine max
  unsure (1)..(832): unsure at all Xaa locations
  Clone ID: TF_GmC795_1.pep
RHRATRAEKLRFQSLNADVQEAYMRMVKESNNERLTLLLEETTXLLVNLGVADQAYXQIKTMLXMELYEDSESNFPESAGLKNVISKESPLEEDVDLIDSDRNGGDTSDLLEGQRQYNSAIHSIQEKVSEQPSILQGGELRPYQLEGLQWMLSLFNNNLNGILADEMGLGKTIQTISLIAYLMEHKGVTGPHLIVAPKAVLPNWINEFSTWAPSITTILYDGRLDERKAMKEELSGEGKFNVLITHYDLIMRDKAFLKKIHWLYLIVDEGHRLKNHECALARTLDSGYHIQRRLLLTGTPIQNSLQELWSLLNFLLPNIFNSVQNFEDWFNAPFADRVDVSLTDEEQLLIIRRLHQVIRPFILRRKKDEVEKFLPSKSQVILKCDLSAWQKVYYQQVTDVGRVGLDNGSGKSKSLQNLTMQLRKCCNHPYLFVGDYDIHKHKEEIFRASGKFELLDRLLPKLRRAGHRVLLFSQMTRLMDILEIYLRLNDFKFLRLDGSTKTEERGSLLRKFNAPDSAYFMFLLSTRAGGLGLNLQTADTVIIFDSDWNPQMDQQAEDRAHRIGQKKEVRVFVLVSVGSIEEVILERAKQKMGIDAKVIQAGLFNTTSTAQDRREMLQEIMRRGTSSLGTDVPSEREINRLAARSDEEFWLFEKMDEERRQKENYRSRLMEEHELPDWVYSPLNKDDKVKIFDSGSVTGKRKRNEVVYADTLSDLQWMKAVENGQDISKLSVKGKRRDHLPVDNHAQASDDMGTEERLFRSEDTFDVTPASKRLKPEEINSQKHENEDVSVGGLNEHIFSWNTRRKKRSGYLGQGSFSDSRGQNSNGRANWN

SEQ ID NO: 32589 - protein, 147 aa, Glycine max
  Clone ID: TF_GmC78074_1.pep
ARKGARVGTSTKLREYELQYILQDNGVLLTTYDIVRNNSKSLQGNNYFDDEDNEEGATWDYMILDEGHLIKNPSTQRAKSLLEIPSAHRIIISGTPLQNNLKELWALFNFCCPELLGDHKWFKERFENPILRGNDKHASDREKRVGS

SEQ ID NO: 32590 - protein, 89 aa, Glycine max
  Clone ID: TF_uC-gmrominsoy142a11b1.pep
LFVRDNLDPLVKRAVAAASAVPDLQDRYHKIPSYIESKLLPFQREGVRFILQHGGRVLLADEMGLGKTLQAIHCLILNHFHTSTVHYDA

SEQ ID NO: 32591 - protein, 207 aa, Glycine max
  unsure (1)..(207): unsure at all Xaa locations
  Clone ID: TF_LIB4280-051-Q1-K1-E4.pep
PWSLNLLQGSASPEKPVSQENDNVWVLIPELKAKLHAHQKKAFEFLWQNIAGSMDPGLMEAASKRRGGCVVSHTPGAGKTFLIIAFLVSYLKLFPGKRPLVLAPKTTLYTWYKEFIKWDIPIPVYLIHGRRTYRVFKQKSSIVIPGVPKPTDDVKHVXDCLEKIQXWHSHPSVLIMGYTSFLTLMREDSXFAHRKYMAXKVLRESPW

SEQ ID NO: 32592 - protein, 1236 aa, Glycine max
  Clone ID: TF_GmC143184_2.pep
MMHRKSHLRQRKHPFHACPFEAYLSRSWRAVELIKFESGTTTLYFVDNHHMTIKKGSFSDVRVRSRKATLSDCSFLRTGIDICVLSASQGNDNSDESSANHVWLDAKINSIQRKPHNPECSCQYYVNFYVNQGSLGTELRTLRKEVKVVGINEIAILQKLERNTCQHKYYRWESSEDCSKVPHTKLLGKFISDLSWLVVASAIRKVSFCARSVENNIVYQILGSDATTSSLYMDSEISVVNFKVNEDGMQMPVIHLVDLFETDTNTSGDKHDSHYDEVPSSYGFEGLRRSKRRNIQPERYSDCGNVSEIKVGNVRTWPYKLNKRKDDDGGGEESLPLAQENSDNSQKVNELSSCREIIVYHGRNETLELKSGEANQTQLASVPLLQEGDSLALEHHHLNDNVTRRSDAYYSTPKLKRKRLVDLEADVDFDPGREGINSNKGVSEKRHGSSWYSRSRSHAAEHSYKDRSLNATAYKEMIDSYLKDVNRTPTTEEPPVMDQRKEIGNFGQKKEAEIPEREDEEQISEIDMLWREMEMALASSYLEETEGSNSANFAKTTEESNRTCPHDYRLSEEIGIYCYKCGFVKTEIKYITPPFIEMQRSVRHQEEKQCNGKDTKEKASKDDDFHLLSTHAPTDEHNSMEHDNVWKLIPQFREKLHDHQKKAFEFLWQNIGGSMEPKLMDAESKRRGGCVISHAPGAGKTFLIIAFLVSYLKLFPGKKPLILAPKGTLYTWCKEFNKWEISMPVYLIHGRGGTQKDTEQNSIVLPGFPNPNKYVKHVLDCLQKIKLWQEKPSVLVMSYTAFLALMREGSEFAHRKYMAKALREGPGILILDEGHNPRSTKSRLRKGLMKLKTDLRILLSGTLFQNNFCEYFNTLCLARPKFISEVLDTLDPITRRKSKTVEKAGHLLESRARKLFLDKIAKKIDSGIGNERMQGLNMLRETTNGFVDVYESENFDSAPGLQIYTLLMNTTDKQREILPKLHTRVDECNGYPLELELLVTLGSIHPWLVKTTSCANKFFTADQLKQLDKYKYDMKAGSKVKFVLSLVFRVMQREKVLIFCHNLAPVKLLIELFEMFFKWKKDREILLLSGELDLFERGKVIDKFEEHGGASKVLLASITACAEGISLTAASRVIFLDSEWNPSKTKQAIARAFRPGQEKMVYVYQLLVTGTLEEDKYKRTTWKEWVSSMIFSEAFEENLSHSRAVNIEDDILREMVEEDKSKTIHMILKNEKASTN

SEQ ID NO: 32593 - protein, 484 aa, Glycine max
  unsure (1)..(484): unsure at all Xaa locations
  Clone ID: TF_GmC290_1.pep
RPSFRYSTSDGAHSCCDWLEAKRRWCLSGTPIQNAIDDLYSYFRFLRYDPYSDHASFCTRIKNPISRNPANGYRKLQAVLKTIMLRRTKGTLLDGEPIISLPPKYIELKKVDFSMEERDFYSKLEADSRAQFQEYADAGTVKQNYVNILLMLLRLRQACDHPLLVKRYNSNSLWRSSVEMAKKLPQEKQISLLKCLEVSLALCSICNDPPEDAVVSVCGHVFCNQCICEHLSGDDNQCPAANCKSQLSTSMVFSKATLNTCLSDHGCYISPIYGGTVAEETEPWSESKPYDSLKMKAALEVLRAIXRRSCTNPAVIEKIEVXASAFGEDGTGDRQTRLTVDDLKYLFMMXIXDVHIYRYNLHFLDWXFFDLGADVILSFFPVTXLTKQKQNISSKGLEVVTRLLYGSLKWNPQTEDQAIDRAHRIGQTRPVTVLRLTVRDTVEDRILALQQKKRMMVASAFGEDGTGDRQTRLTVDDLKYLFMM

SEQ ID NO: 32594 - protein, 212 aa, Glycine max
  unsure (1)..(212): unsure at all Xaa locations
  Clone ID: TF_GmC737624_1.pep
YGLYKNNHGGILGDDMGLGKTIQAIAFLAAVFAKEGHSTLNENHVEKRDPALIICPTSVIHNWESEFSKWSNFSVSIYHGANRNLIYDKLEANEVEILITSFDTYRIHGSSLLDINWNIVIIDEAHRLKNEKSKLYKACLEIKTLRRYGLTGTAMQNKIMELFNLFDWVAPGSLGTREHFREFYDEPLKHGPRSTASDRFXQIANKRKHHLG

SEQ ID NO: 32595 - protein, 1250 aa, Glycine max
  Clone ID: TF_GmC143184_1.pep
MEASVLLGNSYGVVARVAVAGLRGGVMGSAISPFEAYLSRSWRAVELIKFESGTTTLYFVDNHHMTIKKGSFSDVRVRSRKATLSDCSFLRTGIDICVLSASQGNDNSDESSANHVWLDAKINSIQRKPHNPECSCQYYVNFYVNQGSLGTELRTLRKEVKVVGINEIAILQKLERNTCQHKYYRWESSEDCSKVPHTKLLGKFISDLSWLVVASAIRKVSFCARSVENNIVYQILGSDATTSSLYMDSEISVVNFKVNEDGMQMPVIHLVDLFETDTNTSGDKHDSHYDEVPSSYGFEGLRRSKRRNIQPERYSDCGNVSEIKVGNVRTWPYKLNKRKDDDGGGEESLPLAQENSDNSQKVNELSSCREIIVYHGRNETLELKSGEANQTQLASVPLLQEGDSLALEHHHLNDNVTRRSDAYYSTPKLKRKRLVDLEADVDFDPGREGINSNKGVSEKRHGSSWYSRSRSHAAEHSYKDRSLNATAYKEMIDSYLKDVNRTPTTEEPPVMDQRKEIGNFGQKKEAEIPEREDEEQISEIDMLWREMEMALASSYLEETEGSNSANFAKTTEESNRTCPHDYRLSEEIGIYCYKCGFVKTEIKYITPPFIEMQRSVRHQEEKQCNGKDTKEKASKDDDFHLLSTHAPTDEHNSMEHDNVWKLIPQFREKLHDHQKKAFEFLWQNIGGSMEPKLMDAESKRRGGCVISHAPGAGKTFLIIAFLVSYLKLFPGKKPLILAPKGTLYTWCKEFNKWEISMPVYLIHGRGGTQKDTEQNSIVLPGFPNPNKDVKHVLDCLQKIKLWQEKPSVLVMSYTAFLALMREGSEFAHRKYMAKALREGPGILILDEGHNPRSTKSRLRKGLMKLKTDLRILLSGTLFQNNFCEYFNTLCLARPKFISEVLDTLDPITRRKSKTVEKAGHLLESRARKLFLDKIAKKIDSGIGNERMQGLNMLRETTNGFVDVYESENFDSAPGLQIYTLLMNTTDKQREILPKLHTRVDECNGYPLELELLVTLGSIHPWLVKTTSCANKFFTADQLKQLDKYKYDMKAGSKVKFVLSLVFRVMQREKVLIFCHNLAPVKLLIELFEMFFKWKKDREILLLSGELDLFERGKVIDKFEEHGGASKVLLASITACAEGISLTAASRVIFLDSEWNPSKTKQAIARAFRPGQEKMVYVYQLLVTGTLEEDKYKRTTWKEWVSSMIFSEAFEENLSHSRAVNIEDDILREMVEEDKSKTIHMILKNEKASTN

SEQ ID NO: 32596 - protein, 70 aa, Glycine max
  unsure (1)..(70): unsure at all Xaa locations
  Clone ID: TF_701010777H1.pep
QDLSQPKSEVSPPEGLLXVPLLRHXXIALSWMVQKETSSLYCSGGILADDQGLGKTVSTIALILKRPPFT

SEQ ID NO: 32597 - protein, 549 aa, Glycine max
  unsure (1)..(549): unsure at all Xaa locations
  Clone ID: TF_GmC27_1.pep
YDDHAVSSKKRKCPPSSKSGKKGLDSAMLEAVARPLAKVAWFRVVLDEAQSIKNHRTQVARACWGLRAKRRWCLSGTPIQNAIDDLYSYFRFLRYDPYAVYTSFCSTIKIPISRSPSKGYRKLQAVLKTIMLRRTKATLLDGEPIISLPPKSVELKKVEFSPEERDFYSRLEADSRAQFQEYADAGTVKQNYVNILLMLLRLRQACDHHLLVKRDNSKSLSKSSFEAPQNNSSKIKSGLEMXFSWCLNHNVVLPKTILNILLFEMVLMAFVVSVLVMXNEAIEFSQGTNMKDILSTPSVFSKVTLNSSFSDQAGDNLPDYSGCEVEESEFFSQAQPCYSSKIKAALEVLQSLSKPQCFASQNNSVQSTSGESTDGLGIKMCFEERSSNNSVGVGEKAIVFSQWTRMLDILEACLKNSSIQYRRLDGTMSVTARDKAVKDFNTLPEVSVMIMSLKAASLGLNMVAACHVLMLDLWWNPTTEDQAIDRAHRIGQTRPVTVLRLTVRDTVEDRILALQQKKRKMVASAFGEDGTGGCQSRLTVDDLKYLFMM

SEQ ID NO: 32598 - protein, 152 aa, Glycine max
  Clone ID: TF_GmC358725_1.pep
SARVQNPIENGQHTNSTLIDVKIMNQRSHILYEQLKGFVQRMDMNVVKKDLPPKTVFVITVKLSPLQRKLYKRFLDVHGFTTQVHPEMLRKRCFFAGYQALARIWNHPGILQLTKEVKDYVKHEDAVENFLVDDSYSDENSDYNVLAGGKSS

SEQ ID NO: 32599 - protein, 152 aa, Glycine max
  Clone ID: TF_GmC122791_1.pep
GEYVCQMCSELIQATESPIASGATLIICPAPILPQWHDEIIRHTHQGSLKTCIYEGVRDTSFSNTSLMDIGDLASADIVLTTYDVLKEDLSHDSDRHEGDRHFLRFQKRFAPKSAIFLLCQYIFISYVGYFTYTFLDEFEIHRSFHSSSFHF

SEQ ID NO: 32600 - protein, 200 aa, Glycine max
  unsure (1)..(200): unsure at all Xaa locations
  Clone ID: TF_LIB4167-057-R1-K1-E8.pep
MSTKLISIMCVVWYFVCFGFLVCLTIPLPSPSLFCRALLHFLDPDKFRSKDEFVQNYKNLSSFNENELANLHMELRPHILRRVIKDVEKLLPPKIERILRVEMAPLQKQYYKWILERNFHNLNKGVRGNQVSLLNIVVELKKCCNHPFLFESADHGYGGDSXSSDNSKLERNGFSSGKLGILDKLLVKLHETKHXGFDFL

SEQ ID NO: 32601 - protein, 659 aa, Glycine max
  Clone ID: TF_GmC291_1.pep
LEIDADMNNRGKGRLKYLLQQTELFAHFAKGDQSSSQKKSRGRGRHASNFTEEEEDEEYLKGEEDGLANTRLVTQPSCIQGKMRDYQLAGLNWLIRLYENGINGILAGEMGLGKTLQTISLLGYLHEFRGIKGPHMVVAPKSTLGNWMNEIRRFCPVLRAIKFLGNPDERRHIRDELLVAGKFDVCVTSFEMAIKEKSALRRFSWRYIIIDEAHRIKNENSLLSKTMRLYSTNYRLLITGTPLQNNLHELWSLLNFLLPEIFSSAETFDEWFQISGENDQQEVVQQLHKVLRPFLLRRLKSDVEKGLPPKKETILKVGMSQMQKQYYRALLQKDLEVVNAGGERKRLLNIAMQLRKCCNHPYLFQGAEPGPPFTTGDHLIENAGKMVLLDKLLPKLKERDSRVLIFSQMTRLLDILEDYLMFRGYQYCRIDGNTGGDDRDASIDAFNKPGSEKFVFLLSTRAGGLGINLATADVVILYDSDWNPQVDLQAQDRAHRIGQKKEVQVFRFCTEYTIEEKVIERAYKKLALDALVIQQGRLAEQKTVNKDELLQMVRFGAEMVFSSKDSTITDEDIDRIIAKGEEATAELDAKMKKFTEDAIKFKMDDTAELYDFDDEKDENRFDIKKIVSENWIEPPKRERKRNYSESEYFKQTMRQVSTN

SEQ ID NO: 32602 - protein, 175 aa, Glycine max
  unsure (1)..(175): unsure at all Xaa locations
  Clone ID: TF_LIB4280-053-Q1-K1-G10.pep
PRVRYKAREAAMAVQGKMVDSQRKKSKASLRKLEEQPEWLKGGKLRDYQLEGLNFLVNSWRNDTNVILADEMGLGKTVQSVSMLGFLQNAQQIHGPFLVVVPLSTLSNWAKEFRKWLPDMXXIIYVGTSCVEKEFSTNEPSCLSGTSSTNSVEEPMALLSLIQVQESKDEFVQNY

SEQ ID NO: 32603 - protein, 370 aa, Glycine max
  unsure (1)..(370): unsure at all Xaa locations
  Clone ID: TF_GmC6683_1.pep
EQSESERDFYEALFERSKVQFDQYVAQGKVLHHYANILDLLMQLRRCCNHPFLVMCGSDTQKRADLSRLARKFFQTNTEFPDESNQNDPRQQAELNKLASRLLLKSASSLHSVQPHAYIAEVLENIQKGDIIECSICMESPEDPVFTPCAHKFCRECLFSCWGTSVGGKCPICRQLLQKDDLITYSSESPFKVDIKNNVTESSKVSKLFEFLQRILNTSSEKSIVFSQWTSFFDLLENPLRRRGIXFLRYDGKLTQKQREKVLDEFNETREKRVLLMSLKAGGVGLNLTAASNVFIMDPWWNPAVEEQAIMRIHRIGQNRRVVVRRFIVKDTVEDRLQQVQARKQRMISGTLTDDEVRTARIQDLKMLFT

SEQ ID NO: 32604 - protein, 103 aa, Glycine max
  Clone ID: TF_GmC972_1.pep
GIRHARLCHVPLIVEVVCCRLTPLQSNLYKHFIQSKNVKRAITEELKQSKILAYVTALKKLCNHPKVPINAAGLIRYNWCHPFFGKIIIHLMNMIIYSSLLQL

SEQ ID NO: 32605 - protein, 456 aa, Glycine max
  Clone ID: TF_GmC27_2.pep
IRLEISRSPSKGYRKLQAVLKTIMLRRTKGSLLDGEPIISLPPKSVELKKVEFSQEERDFYSKLEADSRAQFQEYADAGTVKQNYVNILLMLLRLRQACDHPLLVKRYNSNSLWKSSVEMAKKLPQEKRLCLLKCLEASLALCGICNDPPEDAVVSVCGHVFCNQCICEYLTGDDNQCPAPNCKTRLSTPSVFSKVTLNSSFSDQPCDNLPDYSGCEVEESEFCSQAQPYDSSKIKAALEVLQSLSKPQCFASQNNSVQSTSGESTDGLGSSSSADRMKSLNEIPESQNVLEERSSNNSVGVGEKAIVFSQWTRMLDILEACLKNSSIQYRRLDGTMSVTARDKAVKDFNTLPEVSVMIMSLKAASLGLNMVAACHVLMLDLWWNPTTEDQAIDRAHRIGQTRPVTVLRLTVRDTVEDRILALQVSVGCSFWWKQKKQGAENFVAWPLLTLDMKII

SEQ ID NO: 32606 - protein, 440 aa, Glycine max
  Clone ID: TF_GmC157_1.pep
PIIFVSLSILPNGASIGNPNFHLRPSMELRSRRRLSNPSVSGKEQPPGDDAVGEDETTTGKGSNNKDKGVAVISSNSDIVSGPDSDSDYEDEEFGVGSLPDLNQDPSSISFSSGEDYASDSSDGGKSLYKRGKALLSRGKRKSFNTEYGEPSDVVRVAEYKDDDAQFAIFQELSVPSVSKGTKRRKYSRKGRKGDSKSVLLWNAWEEEQEKWIDRHMLEDVDLDNHSEVMNETADIPSDLTMPLLRYQKEWLAWALKQESSASKGGILADEMGMGKTVQAIALVLAKREFELGCEPDQSIPCSSSLKPAIKGTLVICPVVAVTQWVSEVDRFTLKGSTKVLIYHGANRGRSGNRFADYDFVITTYSVVESEYRKHMLPPKERCPYCGKLFLPNKLMYHQIYFCGPDAVRTEKQSKQAKKKKREVTKGKTKRSYQGEDQEI

SEQ ID NO: 32607 - protein, 198 aa, Glycine max
  unsure (1)..(198): unsure at all Xaa locations
  Clone ID: TF_GmC400016_1.pep
ARGRMHSSKFSSTDSCDLLICDEAHRLKNDQTITNRAFAGESCQCPVXIVCKRRILLSGTPLQNDLEEFFAMVNFTNPGILGDIAHFRRYYEAPIICGREPAATAEEKKLGAEQSAELSVNVNRFILRRTNALLSNHLPPKIVEVVCCKLTPLQSELYKHFIQSKNVKRAITVELKQSKILVYITALKXLCNHSKLIL

SEQ ID NO: 32608 - protein, 229 aa, Glycine max
  unsure (1)..(229): unsure at all Xaa locations
  Clone ID: TF_LIB4281-011-R1-K1-C10.pep
PRPPKAVLPNWVNEFTTWAPSITAILYDGRLDERKAMKEELSGEGKFNVLLTHYDLIMRDKAFLKKIQWKYLIVDEGHRLKNHESALARTLDNGYRIQRRLLLTGTPIQNSLQELWSLLNFLLPNIFNSVQNFEDWFNAPFADRVDVSLTDEEQLLIIRRLHQVIRPFILRRKKDEVEKFLPGKSQVILKCDMSAWQXVYYQQVTDVGRVGLDNGSGKSKSLQNLTMQL

SEQ ID NO: 32609 - protein, 204 aa, Glycine max
  Clone ID: TF_GmC23376_1.pep
MEEEEDEVGWCSSDSGDGDGDDDIEERKSQNVDALLRGNLVVKRQSLLPRLLSVSQGAAVCRKPFKPPCSKSHASASAYNQDLTRKLSARKRFVPWGSSSPIPIPIPRSALDDSKFNVAVAVADVAEELKPSLPPGIDPLVLWHPQDSEDANANFTTITVDPVLVRYLRPHQREGVQFMFDCVSGLSTTPNIHGCILADDMGLG

SEQ ID NO: 32610 - protein, 159 aa, Glycine max
  Clone ID: TF_13791645.pep
MLPQNGIVKEESNMCEDKPSGYPMNLLKQAKGRPSAGTLIVCPTSVLRQWAEELRSKVNGQATLSVLVYHGSNRTKDPYEVAKHDVVLTTYSIVSMEVPKQPPADKDDEEKEIFEDHATPSRKRKSPSNSSKSGKKKLDGTNLETVARPLAKVSWVRVV

SEQ ID NO: 32611 - protein, 375 aa, Glycine max
  unsure (1)..(375): unsure at all Xaa locations
  Clone ID: TF_GmC1383_1.pep
LLITGTPLXSVEELWALLHFLDPDKFRSKDEFVQNYKNLSSFNENELANLHMELRPHILRRVIKDVEKSLPPKIERILRVEMSPLQKQYYKWILERNFHNLNKGVRGNQVSLLNIVVELKKCCNHPFLFESADHGYGGDSEVXDNSKLERIVFSSGKLVILDKLLVKLHETKHRVLIFSQMVRMLDILGEYMSLRGFQFQRLDGSTKAELRQQAMDHFNAPGSDDFCFLLSTRAGGLGINLATADTVIIFDSDWNPQNDLQAMSRAHRIGQQEVVNIYRFVTSKSVEEDILERAKKKMVLDHLVIQKLNAEGRLEKKEAKKGGSYFDKNELSAILRFGAEELFKEERNDEEXKQLLSMNIDEILGPPGTGGSCTV

SEQ ID NO: 32612 - protein, 369 aa, Glycine max
  Clone ID: TF_GmC47363_3.pep
RVRLVGLQWMLSLYNNKLNGILADEMGLGKTVQVMALIAYLMEFKGNYGPHLIIVPNAVMVNWKSELHTWLPSVSCIFYAGGKDYRSKLYSQEIMAMKFNVLVTTYEFIMYDRARLSKIDWKYIIIDEAQRMKDRDSVLARDLDRYRCQRRLLLTGTPLQNDLKELWSLLNLLLPEVFDNKKAFNDWFSKPFQKEGPTQNTEDDWLETEKKVIIIHRLHQILEPFMLRRRVEDVEGSLPPKVSIVLRCKMSAVQSAIYDWVKSTGTLRLDPEGENSKIQKNPHYQAKEYKTLNNRCMELRKTCNHPSLNYPLLGELSTNSIVKSCGKLWILDRILIKLQRTGHRVLLFSTMTKLLDLLEDYLRLRQNVN

SEQ ID NO: 32613 - protein, 137 aa, Glycine max
  unsure (1)..(137): unsure at all Xaa locations
  Clone ID: TF_uC-gmflminsoy047c04b1.pep
AREREGEEFERALGLLTLAPKRIGNKINRNAILCTRRSRLLKKAYELSVLCDXAELAPIISLQSQESSYDFRSGSSMLNTRERCQKCTYGPPEDNXVATKAALLLESSTQQEYLGLQALYRTLLLAYRHLMGEDLGP

SEQ ID NO: 32614 - protein, 80 aa, Glycine max
  unsure (1)..(80): unsure at all Xaa locations
  Clone ID: TF_700984421H1.pep
YXFYLIIXNNTNXTIALYLIQTKYLXXXSYXXXXXXXXXXRAVSISLSXFXSXLXPSLRYLLNLXXLGQYSTXPRFVKXK

SEQ ID NO: 32615 - protein, 101 aa, Glycine max
  unsure (1)..(101): unsure at all Xaa locations
  Clone ID: TF_jC-gmXLIB3563P040ca04a1.pep
TQVPFWRAGNHSHFDLESHPIITSPLHPEDHARSIFLEKRDGELGSGKIAIHTIENSTNRRDTYSMRTNVILENAXGVTVLCDAHLHAYHRLPSLERGRTT

SEQ ID NO: 32616 - protein, 183 aa, Glycine max
  Clone ID: TF_GmC73666_1.pep
PRVRGRVGSENVPNLSDVTKKTKGRQKIEMKTIANKCSLQVTFSKHRTGVFKKASELATLCGVDLAVIMFSPNNHVYSFGSPNVDSVIQRYTTEGPPPLFTQDLNEAPCTMDEGELQAHLNCLSNQIDAEKQRVEDLNHLLMAAKDHIWWDVPIESMSNAQLEKYHKMLKEIKLKHMRHTHGE

SEQ ID NO: 32617 - protein, 268 aa, Glycine max
  Clone ID: TF_GmC1806_1.pep
MASPASNPQSAETKKSRGRQRVDIKKMSNEANLQVTFSKRRSGLFKKASELCTLCGAEVALVVFSPGQKVFSFGHPSVDGVIERYLTGVAPPEADNMNYIDVHRMAKVVDLNAQLTHIKDQLEAERKRAKELGGIQKEAETHLWWARPVADITDINNLLKLKKAFQQLKQDVSGLAGMALFQSVANGNPGHQFFAGASSSAVPNVVLQSQPLPVAQVFPPAVPQMMFPPPIFENYMVNPNGFDDMGMGGGGFGGAGPSSAGGGGGGFF

SEQ ID NO: 32618 - protein, 95 aa, Glycine max
  unsure (1)..(95): unsure at all Xaa locations
  Clone ID: TF_LIB5118-045-A1-PF1-B9.pep
MVRGKTQIKRIENATSRQVTFSKRRNGLLKKAFELSVLCDAEVALIIFSSSGKLYEFASSSIQCSIERYRRHTKHDNPTTFRSVEQXMQHLKQEA

SEQ ID NO: 32619 - protein, 78 aa, Glycine max
  Clone ID: TF_GmC1804_1.pep
MTRTRIKIKKIDNITARQVTFSKRRRGLFKKAEELSVLCDAEVGLIVFSSTGKLFDYSSSRYVYGRRLVYYNTPLLSF

SEQ ID NO: 32620 - protein, 97 aa, Glycine max
  Clone ID: TF_GmC1920_1.pep
HIRGSQNHVGPAGADENPKWGKKEIVSKCTKNAEPCKVAVSSQPLWSFEVKRFPFSQPYLVWCLPSHLQPSNCYSSQNTSSNFSFSWACLCSERARN

SEQ ID NO: 32621 - protein, 54 aa, Glycine max
  unsure (1)..(54): unsure at all Xaa locations
  Clone ID: TF_LIB3108-017-Q1-K1-D12.pep
MVKEKIHIKKIDNASARHVTLLXRRRGLFKISEEPSFLCDADDALNIFFTTGKL

SEQ ID NO: 32622 - protein, 112 aa, Glycine max
  unsure (1)..(112): unsure at all Xaa locations
  Clone ID: TF_GmC134_4.pep
MEDPNQAPQASSQKKMGRGKIEIKRIENTTNRQVTFCKRRNGLLKKAYELSVLCDAEVALVVFSTXGRLYEYANNSVRATIERYKKANAAASNAESVSEANTQFYQQESSKL

SEQ ID NO: 32623 - protein, 61 aa, Glycine max
  Clone ID: TF_GmC7683_1.pep
MGRGKIAIRRIDNSTSRQVTFSKRRNGLLKKARELSILCDAEVGLMVFSSTGKLYDYASTR

SEQ ID NO: 32624 - protein, 110 aa, Glycine max
  Clone ID: TF_GmC138_3.pep
MGRGRVQLKRIENKINRQVTFSKRRAGLLKKAHEISVLCDAEVALIVFSHKGKLFEYATDSCMEKILERYERYAYAERQLVANDSESQVCYLFHNILAERHLHKYRHENV

SEQ ID NO: 32625 - protein, 54 aa, Glycine max
  Clone ID: TF_19052527.pep
APGKMHILMIENSTYRQVTYSILPNGLFNNANELTDLCDANGAMIMLSRTGKLQ

SEQ ID NO: 32626 - protein, 112 aa, Glycine max
  Clone ID: TF_GmC182_3.pep
MGRGRVELKRIENKINRQVTFAKRRNGLLKKAYELSVLCDAEVALIIFSNRGKLYEFCSSSRYAVCVDPFFSVSSLCEILKITFSLLTYEIYLLHYFIFYFFGAFLWICLIC

SEQ ID NO: 32627 - protein, 76 aa, Glycine max
  Clone ID: TF_LIB3242-424-P2-J1-C3.pep
SSIVEDHESILGISKVAQLISFLQKPDLSLCEDHSPVDHVAKSLKLHSSPSHHSLSFFPLSFSRSEYVHTHTIKNV

SEQ ID NO: 32628 - protein, 90 aa, Glycine max
  Clone ID: TF_uC-gmrominsoy040a11b1.pep
MVRGKTQMKRIENATSRQVTFSKRRNGLLKKAFELSVLCDAEAALIIFSPRGKLYEFASSSMQESIERHRMHTKHVNPTTFRSVEQNMQH

SEQ ID NO: 32629 - protein, 117 aa, Glycine max
  Clone ID: TF_uC-gmroLIB3258052e05a1.pep
GRGKIVIRRIDNSTSRQVTFSKRRSGLLKKAKELAILCDAEVGVMIFSSTGKLYDFASSGMKSVIDRYNKSKEEPCQLGSSASEIKVVIIDILRQYMHGSLQSSHELLRRYIICIDH

SEQ ID NO: 32630 - protein, 302 aa, Glycine max
  Clone ID: TF_GmC1919_1.pep
MGRVKLPIKKIENTTNRQVTFSKRRNGLIKKAYELSVLCDVDVALIMFSPSGRATFFSGNKSIEEILERYVNLSEGEHGRMHNKEHIQKLLSKLKDEAGQICQAPSSMTSDSQIEDLRREIFTCKSQLEEMEKRLRIFEGDPSEITTLSEAEYREYVLRDTLKQVQLRKCVLEEYNSHATHSPQVHAAKTVDVNGFISRASKNPVDWFPQGDPLHVQTLNFANVYDTALVRDQQSHHCTVVDMLTPTSTLLHSANMDLNGQMNPRSSLDAGISNTLHPQFGQAIHTNSSSWQHLNPLGTYWS

SEQ ID NO: 32631 - protein, 239 aa, Glycine max
  Clone ID: TF_GmC742252_1.pep
MTRKKVKLAFIANDSARKATFKKRKKGLMKKVSELSTLCGIDACAIVYSPYDPQPEVWPSPMGVQRVLAKFRRMPELEQSKKMVNQESFLRQRIMKAKDQLKKQRKDNREKEMTQLMFQYLSAGKIMHNISMVDLNDLAWLIDQNLKDINRRIEVLTKNAQSQPQIAAPAVTDVAAKVEDKGQGSQHGHQGFDINMDLMQKQNWFMNLMNNGGGGGNEAMPIVGDVNQQNGFWPNPFFH

SEQ ID NO: 32632 - protein, 74 aa, Glycine max
  Clone ID: TF_GmC734_2.pep
FSKRRTGLRKKANEISVLCDAQVALIVFNAKGKLFEYSSESSLLQSQTEIVLGKVFKLCGRDYNFVAIFGIVEN

SEQ ID NO: 32633 - protein, 108 aa, Glycine max
  Clone ID: TF_GM459L07.C16.o13.fg.pep
MGKKKVEIKRIENKSTRQITFSKRRNGLMKKARELSILCDAKVALLIFSSTGKLYELCNGDRLKNSVHPDSVGVWTSIKNLHINCMVRVQVPPFHTLYHIQGSGRRVN

SEQ ID NO: 32634 - protein, 45 aa, Glycine max
  unsure (1)..(45): unsure at all Xaa locations
  Clone ID: TF_LIB3242-252-Q1-J1-E2.pep
MEDPNKAPEASFQNKMGXGKIEFKRIENTTNRQVTFCKRRNVLLK

SEQ ID NO: 32635 - protein, 43 aa, Glycine max
  unsure (1)..(43): unsure at all Xaa locations
  Clone ID: TF_700786334H1.pep
MAREKVQIKTIDNATARQVTFSKRRRGLFXTAEELSVLSDANA

SEQ ID NO: 32636 - protein, 190 aa, Glycine max
  Clone ID: TF_GmC401_1.pep
MARKKLNLTYITNDPKRKTTLKKRKNGLMKKMNEISTLCGIESCAIIYSPNDPQPEVWPSDSGVQRVLSRFMEMSEVKQSRKMLNQENLLRQMINKGQQQLTRQRNQNRKKEMTNLMFQYLTAGKIFGNPSLVDLNDLSWLIDQNLNEIEKKITMLQIQEVTPVIENGEQEHMHHVQGLESNMDTKQKKH

SEQ ID NO: 32637 - protein, 104 aa, Glycine max
  Clone ID: TF_LIB3242-181-Q1-J1-H8.pep
FDLCTQTDIKQAININVGMLKLDLNRIEYNIIRLVTFAYRRNGSLKKGYELSGFCDAEVALMIFSIRDKVYEHCSGHSKTHSNIIKSFVYGRFCVCPFGGFLQP

SEQ ID NO: 32638 - protein, 300 aa, Glycine max
  Clone ID: TF_GmC1003_1.pep
MGRARISLKHISNERSRKKTFMERRKVLIKKISEFSTLCGVEACLIVYDDGNGDIEPVTCPKDPVLAHSILQNYEFQKNQRPPKKFGIQDFVEDRKNIIEAEISKVHKEITNIKYPTSDPSFINMEEDQLRAFIALVDAKIRTCDHSLKNMHQSEANFMQNMAWGSASSSHPTPMEPLNNNGRVDVTNSIDQVYEAMQLVDAPFSYIPDMVQKSFNCLQNISQSQPILDVEDEMVGFSNRVDVSLDTTNQIADLLDWFDGPIIGWSDLVDWTSQPDESQNEQQGGGDLDGFQTECYNLNF

SEQ ID NO: 32639 - protein, 89 aa, Glycine max
  Clone ID: TF_LIB4391-011-R1-K1-G8.pep
MGRARISLKHISNERSRKKTFMERRKVLIKKISEFSTLCGVEACLIVYDDGNGDIEPVTCPKDPVLAHSILQNYEFQKNQRPSKKVGYS

SEQ ID NO: 32640 - protein, 77 aa, Glycine max
  Clone ID: TF_GmC1805_2.pep
MGRGKVVLERIQNKINRQVTFSKRRNGLLKKAFELSVLCDAEIALVIFSSRGKLFQYSSTEYFSSISHLFYHYNPRF

SEQ ID NO: 32641 - protein, 92 aa, Glycine max
  Clone ID: TF_LIB3242-724-P1-K1-D8.pep
HQITHIVQIHKLSTMEDPNQAQEGSSQKKMGRGKIEIKRIENTTNRQVTFCKRRNGLLKKAYELSVLCDAEVALVVFSTRGRLYEYANNSGR

SEQ ID NO: 32642 - protein, 165 aa, Glycine max
  unsure (1)..(165): unsure at all Xaa locations
  Clone ID: TF_jC-gmXLIB3563P038dh09a1.pep
EAGKDRAXARGKNQXKRXENTTNRQXXKXKRRKGXXKKANEXTXXRXAKVFIXXXSSXGKXHEXNSPXTXTKXGXDQXQXXXGXXXXNXQXEXXQENXKKXKDXXRXXXKEXRQRKGEXXNEXSXEEXKXXEEEXDKAAKXXXEXKXKGKTXQXDTQRKKXKNEK

SEQ ID NO: 32643 - protein, 100 aa, Glycine max
  unsure (1)..(100): unsure at all Xaa locations
  Clone ID: TF_6747007.pep
WLLFKFHDYNYXLKIKGCIDKDSGDLAGLRGSRKSIILGTQHRRDEHVNNPSNTPALCTIGHXTLRELRGGNGGRASREADLIVTEELVMITFETYVYEP

SEQ ID NO: 32644 - protein, 156 aa, Glycine max
  unsure (1)..(156): unsure at all Xaa locations
  Clone ID: TF_LIB5118-019-A1-PF1-B1.pep
SVPTLQILVSPLTLNCKMNLKSVALLALPVXRPPQSFAAAIMRIRESETTALIFASGLMICSGAKSXPQSKLALRDHARISPKLAFPPRCTEFXIQNIVGSCDVKFPILLEALAYSHAALLRYEPESTPSAHLMMPHNLITTSVRISLEAKLNQAH

SEQ ID NO: 32645 - protein, 200 aa, Glycine max
  Clone ID: TF_GmC1803_2.pep
MAEQALEGSQPVDLTKHPSGIVPTLQNIVSTVNLDCKLELKSIALQARNAEYNPKRFAAVIMRIREPKTTALIFASGKMVCTGAKSEQQSKLAARKYARIIQKLGFPAKFKDFKIQNIVGSCDVKFPIRLEGLAYSHSAFSSYEPELFPGLIYRMKQPKIVLLIFVSGKIVLTGAKVRDETYTAFENIYPVLTEFRKNQQ

SEQ ID NO: 32646 - protein, 273 aa, Glycine max
  Clone ID: TF_GmC1803_9.pep
MAEQALEGSQPVDLTKHPSGIVPTLQNIVSTVNLDCKLELKSIALQARNAEYNPKRFAAVIMRIREPKTTALIFASGKMVCTGAKSEQQSKLAARKYARIIQKLGFPAKFKDFKIQNIVGSCDVKFPIRLEGLAYSHSAFSSYEPELFPGLIYRMKQPKIVLLIFVSGKIVLTGAKVRDETYTAFENIYPVLTEFRKNQQWYGSGSFSIAIGYTCCNPWARNIMNQYHCLYYFFFFVQLSEYNCVRCRAEVFLIEMTKFFTQFLFWVIYLYKF

SEQ ID NO: 32647 - protein, 144 aa, Glycine max
  unsure (1)..(144): unsure at all Xaa locations
  Clone ID: TF_GmC1803_8.pep
MADQGLEGSQPVDLQKHPSGIVPTLQNIVSTVNLDCKLDLKTIALQARNAEYNPKRFAAVIMRIRDPKTTALIFASGSCTGANNNLAAVCPXSKAGFSMKQPKIVLLIFVSGKIVLTGAKVRDETYTAFENIYPVLTEFRKNQQ

SEQ ID NO: 32648 - protein, 190 aa, Glycine max
  Clone ID: TF_GmC1803_1.pep
MDRIIDRRLGCPSYSLNIVSTVNLDCKLDLKTIALQARNAEYNPKRFAAVIMRIRDPKTTALIFASGKMVCTGAKSEQQSKLAARKYARIIQKLGFPAKFKDFKIQNIVGSCDVKFPIRLEGLAYSHGAFSSYEPELFPGLIYRMKQPKIVLLIFVSGKIVLTGAKVRDETYTAFENIYPVLTEFRKNQQ

SEQ ID NO: 32649 - protein, 200 aa, Glycine max
  Clone ID: TF_GmC1803_3.pep
MADQGLEGSQPVDLQKHPSGIVPTLQNIVSTVNLDCKLDLKTIALQARNAEYNPKRFAAVIMRIRDPKTTALIFASGKMVCTGAKSEQQSKLAARKYARIIQKLGFPAKFKDFKIQNIVGSCDVKFPIRLEGLAYSHGAFSSYEPELFPGLIYRMKQPKIVLLIFVSGKIVLTGAKVRDETYTAFENIYPVLTEFRKNQQ

SEQ ID NO: 32650 - protein, 200 aa, Glycine max; identical to SEQ ID NO: 32649
  Clone ID: TF_GmC1803_6.pep

SEQ ID NO: 32651 - protein, 201 aa, Glycine max
  unsure (1)..(201): unsure at all Xaa locations
  Clone ID: TF_GmC1803_5.pep
MADQGLEGSQPVDLQKHPSGIVPTLQNIVSTVNLDCKLDLKTIALQARNAEYNPKXRFAAVIMRIRDPKTTALIFASGKMVCTGAKSEQQSKLAARKYARIIQKLGFPAKFKDFKIQNIVGSCDVKFPIRLEGLAYSHGAFSSYEPELFPGLIYRMKQPKIVLLIFVSGKIVLTGAKVRDETYTAFENIYPVLTEFRKNQQ

SEQ ID NO: 32652 - protein, 200 aa, Glycine max
  Clone ID: TF_GmC1803_4.pep
MAEQALEGSQPVDLTKHPSGIVPTLQNIVSTVNLDCKLELKSIALQARNAEYNPKRFAAVIMRIREPKTTALIFASGKMVCTGAKSEQQSKLAARKYARIIQKLGFPAKFKDFKIQNIVGSCDVKFPIRLEGLAYSHGAFSSYEPELFPGLIYRMKQPKIVLLIFVSGKIVLTGAKVRDETYTAFENIYPVLTEFRKNQQ

SEQ ID NO: 32653 - protein, 65 aa, Glycine max
  unsure (1)..(65): unsure at all Xaa locations
  Clone ID: TF_4292721.pep
DLHTIVECRGWRIRMPCICAVRIFHLTRXLDHKSYCYTIQLHFLLALPSIIVSTCTGTNPFISIA

SEQ ID NO: 32654 - protein, 326 aa, Glycine max
  Clone ID: TF_GmC2268_16.pep
DAIEGRFHFLFEGRFHFLLEAASFSLDELVDILNVPVALMIADSACSKSHRMVLPSNLWSISWVSWKIRATQALVYGIGLSEERHGQAAGRRLLGLVRGQPLCDDGQLFSAMVVRKPLGTGSLTKANFNWKITWASKLEKCYCIVVLPQNELEVKAEDTTYTIPCLLLLPNSTQVLCILSIPYSLYMQGPMFWAMMISEQKVAHLALKPLGRNNAIDGTCGVGTKEPQLIFASADSESYIVYLGSHSHGPNPSASDLESATNSHYKLLGSHLGKEWNASGPMHVDLLEGALQRQTSVELQTNLWSPWLSKDGSLVLSVQNHLVSSN

SEQ ID NO: 32655 - protein, 246 aa, Glycine max
  Clone ID: TF_GmC2268_8.pep
TAISRTLEGRFHFLFEGRFHFLLEAASFSLDELVDILNVPVALMIADSACSKSHRMVLPSNLWSISWVSWKIRATQALVYGIGLSEERHGQAAGRRLLGLVRGQPLCDDGQLFSAMVVRKPLGTELLTKANFNWKITWASKLEKCYCIVVLPQNELEVKAEDTTYTIPCLLLLPNSTQVLCILSIPYSLYMQGPMFWAMMISEQKVAHLALKPLGRNNAIDGTCGVGTKEPQLIFASADSEEIVDD

SEQ ID NO: 32656 - protein, 234 aa, Glycine max
  Clone ID: TF_GmC18388_2.pep
IFQLTRELGHKSDGETVRWLLEHAPPASVEATGTGTVPAIAVSVGGTLKIPTTSSNEKEAVADASNKKRKRPSNSEFVDININDSVSQSSGLAPVHVAHGLVPVWAVTNPSMVVPANAFWMTPNPPMGPANQQHQLWALSPSVFNVAARPISPLVTTNIPEAWPIMTACSNDSNSAVSTSTVGAKVATESSMAPSVSSSGTKSARTRLLRDFSLQIYDKQELQFLGRSGTHAQS

SEQ ID NO: 32657 - protein, 56 aa, Glycine max
  Clone ID: TF_LIB3093-012-Q1-K1-E3.pep
MVRGSGCDIVQVEGGHIVRSTRHKDRHIKVCTLKGPIDRRVRLSAHTAIQFYDVQD

SEQ ID NO: 32658 - protein, 239 aa, Glycine max
  Clone ID: TF_GmC539_1.pep
MGENKPAEVKDFQIVVAENKEESKKQQQQLAPKRSSNKDRHTKVEGRGRRIRMPALCAARIFQLTRELGHKSDGETIQWLLQQAEPSIIAATGTGTIPASALAAAGNSLSPQAASLSSSLHQHQQKIDELGGSGGSSSRASWQMVGGNLGRPHLGVGVATAAGLWPPHVSGFGFQTPPTTTTPTTTTSSSGPSNATLATESSNYLQKIAFPGFDLPTSATNMMGHMSPAKDDSQGSGGQ

SEQ ID NO: 32659 - protein, 370 aa, Glycine max
  Clone ID: TF_GmC616_1.pep
MFPSTNYTSSGSYPRFPSSSSSTSPYPSFTLLHPENSSSSNNTFLHDPLALTYIPSHYHAPIPETLANWAVADCAILNQDLGGALYGITKKPMKKATKKDRHSKIHTSQGLRDRRVRLSIEIARKFFDLQDMLGFDKASNTLDWLFTKSKKAIKELTRSKHSVESFEFSSSSEGEVVSTIQQQDLQQQHGINLENGKLKEPAAYCVKAKMKESREKARARAREKTSSKVLCNTSGEGKVQELKKKCPATENPQILNQLRSTLQPPHPQNVGGEVPRDDDFNVIEESIVIRRKLKHTLMSSNIHHQNAVIPKEASVNNSDYHSFPNLSPNWEANNGANGRSTFCAIASMNLSTGLQIFGKSWEECTNPHPS

SEQ ID NO: 32660 - protein, 358 aa, Glycine max
  unsure (1)..(358): unsure at all Xaa locations
  Clone ID: TF_GmC12923_1.pep
KLTGGASSPASSSSLAIPTANPKRSTKDRHTKVDGRGRRIRMPATCAARVFQLTRELGHKSDGETIEWLLQQAEPAIIAATGTGTIPANFSSLNVSLRSSGSTLSAPPSKSAPHTFHGALALAHHPYDEAXNTPLLLGFHPHHQPQQLLSADHIPESLPSGAGDSGDNYLRKRYREDLFKDDNINNNNTQSQNESGDGDGSSPKLPKQQSEAGSGLLRPSNLLPATAMWAVAPSPASGPPGSTIWMLPVTAGASSSASSETQMWPFPQSVSGFMPRFNLPVPGALEFQGARAGSLQLGSMSMPQQQHLGLAMSDSNLGMLAALNAYTRASLNVNSDHHQHQHQSQPSESGEDDPNSSQ

SEQ ID NO: 32661 - protein, 340 aa, Glycine max
  unsure (1)..(340): unsure at all Xaa locations
  Clone ID: TF_GmC361_1.pep
MELEADHQNGIRSRPNFPLQLLEKKDVDDVTEQPCSTTSVVTTAAATITSGNNDLHVAEQSKKPPPKRSSTKDRHTKVDGRGRRIRMPAACAARVFQLTRELGHKSDGETIEWLLQQAEPAVIAATGTGTIPANFTSLNISLRSSGSTMSAPSHYFRGNYFNPSTFSTSAAAASAAAVAQLRSRAEWDRNMSMVMEDSRRSMLENTSSISAILNFNPMGNVNVIQQAKQELREESAAAGGGGSLDSVASDSDGSLGRKRRPEQELSQMGSYLIQSSTGSLPSSHASNTAAFWMVAGHGNQAMSGGGGSDGSSDNPIWXFPLLGIAVCIEELCLPQVAFIS

SEQ ID NO: 32662 - protein, 424 aa, Glycine max
  Clone ID: TF_GmC361_2.pep
MELEADHQNGIRSRLNFPLQLLEKKDIDDVTEQPCSTTSVVTATTTAITTTTTSDNNDLHLAEQSKKPPPKRSSTKDRHTKVDGRGRRIRMPAACAARVFQLTRELGHKSDGETIEWLLQQAEPAVIAATGTGTIPANFTSLNISLRSSGSTMSAPSHYFRGNYFNPSTFSTSAAAAAAAQLRSRAEWDRSMSMVMEDSRRSMLENTSSISAILNFNPMGNVNVIQQAKQELREESGGGGGLESVASDSDGSLGRKRRPEQELSQMGSYLIQSSTGSLPASHASNTAAFWMVAGHGNQAMSGGGSGGGGNNGSSDNNPIWAIPSVGNSGVYRGAMSAPGGIHFMNFASPMNLMPGGQLGSGIVGGGGGGGGNGGAQLLSESNLGMLAALNAYRQIPANGVSEPPGSAGQHHGGDDGRDSTSQHS

SEQ ID NO: 32663 - protein, 276 aa, Glycine max
  unsure (1)..(276): unsure at all Xaa locations
  Clone ID: TF_GmC430_1.pep
DRVVQHPPAPYAPLLSLPSHVELRRHQHGPLSAQSQRRRDSTGNRGGRPSPSKKPPSKDXRHSKVDGRGRRISMPIICAARVFQLTRELGHKSDGQTIEWLLRQAEPSVIASPASFYSVSLGCNKRCSALFSCSAPRPQQLAPTPFILGKRIRTDEDSSKDEDGSVGPSLVGPYAPPGPGVVPAWPDFGQIWSFVAAAAAPEMVSVPQQQQQQASLFAHHHRQQQQLAIGEALAARVGNYLPGHLNLLASLSSGPGNSGRRDDEPSLIVTSLQRWR

SEQ ID NO: 32664 - protein, 296 aa, Glycine max
  Clone ID: TF_GmC909_1.pep
GFQSLQQFTSMISKIGLDSTNQARLLIGCSMQQNMKLMNFLHFLFVRLTSPLGNPSVDCCLEVSTSREGSGQNTLLWKPKSGEMVSDDKANWMNRSEGDDDNAHDHTIGKQGSNNNICHGGTLVLPNNLLPRPNHPSFLSLMNIMPSLGYQWEANYSAHDVNIGQWQNHGFLNQTDVHSINVVPFPSTLALSTGNDTTTTSQILVCPPHGATTQPYFPSSHHVAAMEMNARQINHYQMLSSSSHQNLLANSLNPSSQQLMSQSEKLPFSLGIRPKLFHSPNRSESHSQKDQDLPSK

SEQ ID NO: 32665 - protein, 201 aa, Glycine max
  unsure (1)..(201): unsure at all Xaa locations
  Clone ID: TF_GmC355_2.pep
KLEEENHNRGLTLDPNRNYHHHHLLHQQPHHQNLILNSRRHVTNQEDQESHPHQFHIQFQQQREQQSYTALDTELLNPLQPPKKRSCRPPLPPPPPSSLTLSEHARKMGEPQHPHQHHQQAAATPSRAAMRGGGGGEIVEVQGGHIVRSTGRKDRHSKVCTAKGPRDRRVRLAAHTAIQFYDVQDXLXGYDRPSKXAVDWL

SEQ ID NO: 32666 - protein, 240 aa, Glycine max
  Clone ID: TF_GmC430_2.pep
MSNSDGAINAVPPNDANNNTIVEYQQRTTTTTTAAAAALAVKKPPSKDRHSKVDGRGRRIRMPIICAARVFQLTRELGHKSDGQTIEWLLRQAEPSIIAATGSGTTPASFSTVSDHKPLLPPPTPFILGKRIRPDDDSAAKDDAVSLVAPPTPPALWALPPRPDFGQVWSFAAAPELVSVSPQNSMFHHHHQHHQQQQQQAAMGEASAARLGNYLPGHLNLLASLSGGHGNSGRRDDEPR

SEQ ID NO: 32667 - protein, 246 aa, Glycine max
  Clone ID: TF_GmC430_5.pep
MSNSDATTNGVSNGAIIDAQRQQALAVKKPPSKDRHSKVDGRGRRIRMPIICAARVFQLTRELGHKSDGQTIEWLLRQAEPSIIAATGSGTTPASFSSVSLSVRAAANSLSSPSSTSDHKPQLLSPTPFILGKRIRTDEDSSKDEAVSVGPSLVGPSTPPGLWALPARPDFGQIWSFAAAAAPEMVSVSQQQQASLFAHHHRQQQQQAIGEASAARVGNYLPGHLNLLASLSGGPGNSGRRDDEPR

SEQ ID NO: 32668 - protein, 337 aa, Glycine max
  unsure (1)..(337): unsure at all Xaa locations
  Clone ID: TF_GmC18388_1.pep
MDQDDDEAGTTNLSTSDADVAEKETTNNLNGVPKQNNAFEETTGFQVLPLKKEEPTYSDPDTEIVPVKLPKRSSTKDRHTKVEGRGRRIRIPATCAARIFQLTRELGHKSDGETVRWLLEHAEPAIIEATGTGTVPAIAVSVGGALKIPTTSSNSNEEAAAAAASSNKKRKRPSNSEFVDINININDAVSQSSGLAPVHVAHGLVPVWAVSNXSMVVPANAFWMTPNPPMGPANQQHQLWALSPSVFNVAARPISPLVTTNIPEAWPIMTACSNDSNSAVSTSTVGAKVATESSMAPSVSSSGTKSARTRLLRDFSLQIYDKQELQFLGRSGTHAQS

SEQ ID NO: 32669 - protein, 151 aa, Glycine max
  Clone ID: TF_GmC897_2.pep
AKNHTKHNRGGTTITKGMRTNVGDIVQVEGGHIVRSTGRKDRHSKVYTSKGPRDRRVRLSAHTAIEFYDVQDRLGYDRPSKAVDWLIKKAKTSIDKLAELPPWHPPTNHEEEEQNDAAGSSGVIAIEQQQQQQQQQQQQQQQQQQQQQHQQ

SEQ ID NO: 32670 - protein, 405 aa, Glycine max
  Clone ID: TF_GmC7250_7.pep
AIQFYDLQDRLGYDQPSKAVEWLIKSASDSISELPSLNNFPDTPKSDDHEKRANTDVAAGAVDGENYENENGNNNNQSQNMSLSKSGCSSTSETSKGSGLSLSRSDIRVKARERARERTTKEKEKEKNESHHHHSNVVVPHHRHHHHHNPVSQTASFTELLTGGIPKGCDDEEPNNMMMFNKEAAAASSGRQQWCSSSSAAAAAPMDYFLGPSSSRTTTTPPHNHHHHHHQYSSSGGFSLAQIQLGHSLPEAMNHNVSAFNNNVSGENQNHSSSDPHLQQQQHFSFIPDHLMSAVVTSSSHHQPSGSDYNLNFTMSSGLAGYNRGTLQSNSPSLLPHLQRFSPLDGSTVPFFIGAAPSAAVAAPAMENNTTTTNNHHHHQFSSGFDGSRLQLYYGHSDQKGKAKN

SEQ ID NO: 32671 - protein, 443 aa, Glycine max
  Clone ID: TF_GmC553_1.pep
LVEAPGLIRASASIKSNKLPFVRGLNNIKWSSLDPQRKRAFAATVEHAGTTSSSQGMVRGSGGEIVQVEGGHIVRSTGRKDRHSKVCTAKGSRDRRVRLSAHTAIQFYDVQDRLGYDRPSKAVDWLINKAKSSIDQLAHLPPWKPTLPSPAPPHLNDDHSDKPNPNPNPNPNPNPNPNHSPDAQILNQFDHDDGAGAGSSYLPMDNDAIRSFFPTTTSSLVQFQSYPPDLLSRTSSQDLRLSLQSLQDPILLHHNHNNNEHVLFAGTAFDNMVAWNNNSNNNHNNNNHNNNNNNNNNTASNDTCGGGGGGGGGGGGFVFNAPSTLPGPATVASPTVVFGHGYGQGQYFSQTARAARGNSPSVRAWIDAPSFVAAAADHRHHHYLSPAAAAAALVYQSAPSTAAFTAAPGGFSGFRVPARIQGEEEHDGGMSDKPSSASSDSRR

SEQ ID NO: 32672 - protein, 289 aa, Glycine max
  unsure (1)..(289): unsure at all Xaa locations
  Clone ID: TF_GmC63399_1.pep
TSTNHFHQSSWHYSSRIIRVSRASGGKDRHSKVMTXKGLRDRRVRLSVTTAIQFYDLQDRLGYDQPSKAVEWLIKAASEAISELPSLNNPFPDTPKQPSDEKRPTSGGGQQQQQQGFDDADGDTNYQQNQSQNLSLSKSACSSTSETSKGSGLSLSRSEIRVNRVKARERARERAAKEKEKEKEKESDFNIAHHHHHHNVNNMSHTASFTELLTGGIGSTVTVNPNTTTTTTTTATSPNGSSVHQIHEGHDHEANLFNKGSQQQQQQQHHHWSQTVTPMDYFSAGLLVG

SEQ ID NO: 32673 - protein, 345 aa, Glycine max
  unsure (1)..(345): unsure at all Xaa locations
  Clone ID: TF_GmC122255_1.pep
MGMKSTGGAIFQVQGGHIVRSTGRKDRHSKVYTAKGPXRDRRVRLSAHTAIEFYDARERSRPDRPSKAVDWLIKKAKNAIDKLAELPPWHPNPNTTAADAENNNNNNAGSSDMAIAEQSESSGYNFQLQRQLGEDHDNHHHSAFIPSPIDTDAIAFFPTTTATSSINFQTYPPDIISRTNNSTEDLGLSLHSFQDPGLIHHGQSQAGANQTPSNDQTLFSGSTQVGFEANYPRIVTWNSDASIDMNRTGFMVNSPSALLGQGGSAAYSQRGTLQSSFSPSLRPWSDIPMASSEHHHKSQQASIFGSRFLSDALPGFCIPARIQGEDEGHGVGNDRPSSASPNSHH

SEQ ID NO: 32674 - protein, 187 aa, Glycine max
  Clone ID: TF_jC-gmfl02220071b11a1.pep
LELLPTPSSEPSPKKPPPKRTSTKDRHTKVDGRGRRIRMPALCAARVFQLTRELGHKSDGETIEWLLQQAEPSVIAATGTGTIPANFTSLNISLRSSGSSMSVPSQLRSSYFHNSNFSLQPRRSLFLENTNTPSTTTTLLHFQSNNNNAIFQPKHELRESSSLDLSSENNNEEGYFGRIRRPLEQDL

SEQ ID NO: 32675 - protein, 223 aa, Glycine max
  Clone ID: TF_GmC125579_1.pep
MEANPTHDGDDTSETPPPPMVDPSPSPPPQMKEEVMDAEQGGDTSLPMTVVPAHLPVSKAAAKRPSKDRHTKVEGRGRRIRMPATCAARIFQLTRELGHKSDGETIRWLLEHAEPAIIEATGTGTIPAIAVSVGGTLKIPTSSAARPEGEVDTPKKRRRRASNSEFIDVNENQVSVSSGLAPIAQSAYGSGVGGGLVPLWHGNAAASGPFFMFPNASNPQYWA

SEQ ID NO: 32676 - protein, 395 aa, Glycine max
  unsure (1)..(395): unsure at all Xaa locations
  Clone ID: TF_GmC355_1.pep
MQEKWESYNTINNRQQQQQXPSRAAMRGVGGGEIVEVQGGHIVRSTGRKDRHSKVCTAKGPRDRRVRLAAHTAIQFYDVQDRLGYDRPSKAVDWLIKKAKAAIDQLAELPPWNPTATSMQPRQLPQEIVHCENKSLAMDDSMTAAFSSRGESNAFASHQQVEDNENANNISSSSGNKYNTGSGFLPASLDTDNIAETIKTFFPVEATSTSFQSYPPAPPDLGHQDLRLSLQSFQDPIMLHHQPHSHHQPVLFAGTAAAALDFDGGSGWSEHLHQHQQQNHHSEEQRLLYAGGNSGHGGGFVFNTPAPVQVPAFGQFFSQRGPLQSSNTPSIRAWIDPSVDHHHHHHHYLSQLIHQGSVAGGGGFSGFRIPARIQGEEEHDGVSDKPSSASSDSRH

SEQ ID NO: 32677 - protein, 384 aa, Glycine max
  Clone ID: TF_GmC4156_1.pep
MVPWNRILTITKWKDKTQHLATNNERHKIMIKSPKEADFPLKQEGHSQSITDPEKAKASASSVAQWPRLKDPRIVRVSRAFGGKDRHSKVFTIRGLRDRRVRLSVPTAIQLYDLQDRLGLSQPSKVVDWLLDAAKHEIDELPPLPVVPSVNNFTLGHPSAVTSNEATTSNSQPNEQLLNINRSIQWEGSNQNSTWKLKPKEVSREMISTDKPNWISRSEEDKQGSNNEGPSTRVIPNINLLPRANLNHPSFLGLLNTMPHGYQWEPSAGDVSHQLGNNGFANQTDMHSINVVPFPTSTLSLSTGNSQILLCPPGTAQPYFPSHVTMDMDPRQINHYQMLSSGSQNPLANYLNHSFSLAMMTHKPLHSPNSSKSPSHKDQDFPSN

SEQ ID NO: 32678 - protein, 294 aa, Glycine max
  Clone ID: TF_GmC909_2.pep
LYDLQDRLGLNQPSKVVDWLLNAAKHEIDELPPLPIPPGNFTLGYPSLVSCNEVSTSREGSGQNTLLWKPKPGEIMVSDHDKANWMNRREGDDDDDNNHNNSNGDKQGSNNNCHGGALVLPNNLLPTRPNHPSFLGLMNTMPSLGYQWEPNSSAADVNVQWQNHGFFNQTDVHSIDVVPFPSTLALSTGNSTSTTTTSQILVCPPPPGATTQPYFPSSHFATMEMNARQINHYQMLSSSSHQNLLANSLNHPSSQQLMSQSGKAPFSLRIRPKLFHSPNSSESHSQKDQDFPSK

SEQ ID NO: 32679 - protein, 336 aa, Glycine max
  Clone ID: TF_GmC956_1.pep
MADEASGDVDLRLGEPKGPKEEPETEEGSAIRVMPVAVHVPAGMSMSMSKALAQAQAQAQPQKRASTKDRHTKVEGRGRRIRMPATCAARIFQLTRELGHKSDGETIRWLLEHAEPAIIAATGTGTVPAIAMSVNGTLKIPTTSPSDQEPGEPPERKKRKRPANSAYVDINGAAVSVSAGLASSIINNNNQNAATTMTTTMAIPQHTAIPLPQGMVPVWAIPSNAVVPAAGAFFVVPQTASFQHQPQFFTIARPISEFVSSMVTPVVQLQPTSINSSTNTNSNASSTAPSSKSPARATVMAPTTTTTTTRQMLRDFSLEIYDKQELQFMSRASSKH

SEQ ID NO: 32680 - protein, 68 aa, Glycine max
  Clone ID: TF_22521769.pep
MEEECVHQQNVAGNKSNFPLQLLKKKDEGPPPSPPPSAAKAKRPPTKDRHTKVEGRGRRIRMPAACAA

SEQ ID NO: 32681 - protein, 114 aa, Glycine max
  Clone ID: TF_GmC3142_2.pep
MSSMKFCRRCNNVLYPTEDKEEKLLLYACRNCNHEEIADSNVVYRNKIHHSVQRRTRELENVAADPTLPRTKSVRCSQCNHGEAVFFKAPVKGEEGMALIFVCCNPTCGYRWRD

SEQ ID NO: 32682 - protein, 114 aa, Glycine max
  unsure (1)..(114): unsure at all Xaa locations
  Clone ID: TF_jC-gmst02400020f11a1.pep
MEFCPSCGNMLQYELPYMGRPSRFFCSACPYVCHIENRVEIKRKQRLVRKEIEPIFSEDDMTNAPSTEATCPFCGHGKAAFKEFQTRSADEPATLXYKCWNNDCKKQWREGDFN

SEQ ID NO: 32683 - protein, 368 aa, Glycine max
  Clone ID: TF_GmC38330_1.pep
MEKELVELYEAAKKAADAAISGDGKHEESRCIDALEQLKKFPVNYKILVNTQVGKHLKVLTKHPRLKIKAFAIDLIEIWKGIIIKETSKNKNGGSDSKVESANGEKSKAGKMQKSPSVKVEKGETVKVEKIDRNGTTKSSSENMKKVQNDVKNEKTDRSASVKVEKIAKEEKPVSGAKKMSSSSAAPPKLKTMIKSNDATRDKIREILHEALSKVTGEADEDLVDVVNNSDPIRVAVTVESVLFEKWGPSNGAQKVKYRSLMFNLKDSNNPDFRRKVLLGVIEPEQLINMSTAEMASEQRKQEYQKITEKALFECERGGPPKATTDQFKCGRCGQRKTTYYQMQTRSADEPMTTYVTCVVCNNRWKFC

SEQ ID NO: 32684 - protein, 111 aa, Glycine max
  Clone ID: TF_GmC158666_1.pep
MEFCPSCGNMLQYELPYMGRPSRFFCSACPYVCHIENRVEIKRKQRLVRKEIEPIFSEDDMTNAPSTEATCPFCGHGKAAFKEFQTRSADEPATLFYKCLNNDCKKQWREG

SEQ ID NO: 32685 - protein, 114 aa, Glycine max
  Clone ID: TF_GmC7695_2.pep
MSAMKFCRECNNILYPKEDREQKVLLFACRNCDHQEVADNFCVYRNEIQHPVGERTQVLQDVAADPTLPRTKSVRCTQCNHGEAVFFQATARGEEGMTLFFVCCNPNCGHRWRD

SEQ ID NO: 32686 - protein, 76 aa, Glycine max
  Clone ID: TF_GM310N10.C12.o20.fg.pep
MVVTQVQLDRAKDIRRELEMEIIEEHTVMEYSKVSKKCEKCGHGEATYYTRQMRSTDKGQTTFYACTGCGHPSQEN

SEQ ID NO: 32687 - protein, 114 aa, Glycine max
  Clone ID: TF_GmC7695_1.pep
MSAMKFCRECNNILYPKEDRDQKVLLFACRNCDHQEVADNFCVYRNEIHHSVGERTQVLQDVAADPTLPRTKSVRCSQCNHGEAVFFQATARGEEGMTLFFVCCNPNCGHRWRD

SEQ ID NO: 32688 - protein, 92 aa, Glycine max
  Clone ID: TF_GmC869826_1.pep
YNEAQAAACLYIACRQEGVPRTFKEVCAVSKVSKKEIGRCFKLIQKTMETNLDHITSADFMSRFCGNLSLPYPVQVAATRIAKKSVEHDLVV

SEQ ID NO: 32689 - protein, 178 aa, Glycine max
  Clone ID: TF_GmC615_4.pep
MSDAFCSDCKRQTEVVFDHSAGDTVCSECGLVPESHSIDETSEWRTFANESGDNDPNRVGGPSNPLLTDGGLSTVIAKPNGGGGGEFLSSSLGRWQNRGSNPDRALIQAFKTIATMSDRLGLVATIKDRANEIYKRVEDQKSSRGRNQDALLAACLYIACRQEDKPRTVKEICSVANG

SEQ ID NO: 32690 - protein, 487 aa, Glycine max
  Clone ID: TF_GmC1028_1.pep
MKCPYCSAAQGRCATTSSGRSITECTSCGRVVEERQSHPHHVFHVRAQDNPLCLVTSDLALPALNQNNEEEDPFEPTGFITAFSTWALEPSPLYLQSSLSFSGYLAELERTLESSSSSSSSSSSSSLSSTVVVDNLRAYMQIIDVASILGLDCDISDHAFQLFRDCCSATCLRNRSVESLATAALVQAIREAQEPRTLQEISIAANVPQKEIGKYIKILGEALQLSQPINSNSISVHMPRFCTLLQLNKSAQELATHIGEVVINKCFCTRRNPISISAAAIYLACQLEDKRKTQAEICKVTGLTEVTLRKVYKELLENWDDLLPSNYTPAVPPERAFPTTVIASGRSSTAKVDAVEVISSLDPEKLPDIKHSKPNEGPGMVHHPRGKDEAVGGYHASHSTLNQQSTFWQSQLPSGTHNHQNVLQGMDIDVSQRNHQQPEHMAEDTTNGAANGSSLKSNQLCSPPASSASSVMRQFSAPPSSGPSNVR

SEQ ID NO: 32691 - protein, 621 aa, Glycine max
  Clone ID: TF_GmC1205_1.pep
TTAAASVSHCAKNVAGERLDDGFLCCGSCGRVLEDYFFAEEPSFVKNAAGQSKLSGNYVRTVQSEYSESRQRTLDRAYDEIKYLSFGLGVNDEHMAEQALTFYKIALERNFTRGRKSEQVHAACLYIAFRHNNKPYLLIDFSNYLRTDVYVLGAVFLQLCQVLRLGEHPIVQKPVDPSLFIHRYTKNLLKRGSKAVSDTALAIVASMKRDWMQTGRKPSGLCGAALYISALAHGIKCSKPDILKIVHVCEATLTKRLVEFEDTESSSLTVEELNTMAKEHEKNSMIMPGGGLKGCISKDLLCEHKEDSGVTHFALGLCEACYKDFDKLSGGLGGGLDPPAFQRAERERFKKTLPEESVDEACALANASNDQFKSHKEDLHAYVPERANVEHEATKDGKYDDSHREDESETLSDIDDEEVDLYIHDEEGKHIKKLLWETANREYLEEQAAKEAAAAANKKAFEANFENCSEDLLAARELAASSAEAVAKSRKEMRQKRAYEAKNTRPAQSAAEAFGQMSNKKRNLQGLKSKVNFELLNELFDEMENTDDLKKPKKVRFDLPLDNDDNIPSKVEDKNEDEMGLADEFDDEGDMGEMYQNTENMADKYFPEDGDFGYDDYDDYY

SEQ ID NO: 32692 - protein, 314 aa, Glycine max
  Clone ID: TF_GmC615_1.pep
MSDAFCSDCKRQTEVVFDHSAGDTVCSECGLVLESHSIDETSEWRTFANESGDNDPNRVGGPSNPLLTDGGLSTVIAKPNGGGGGGEFLSSSLGRWQNRGSNPDRALIIAFKTIATMSDRLGLVATIKDRANEIYKRVEDQKSSRGRNQDALLAACLYIACRQEDKPRTVKEICSVANGATKKEIGRAKEYIVKQLGLENGNAVEMGTIHAGDFMRRFCSNLCMNNQAVKAAQEAVHKSEEFDIRRSPISIAAAVIYIITQLSDDKKPLKDISLATGVAEGTIRNSYKDLYPHVSKIIPNWYAKEEDLKNLCSP

SEQ ID NO: 32693 - protein, 65 aa, Glycine max
  Clone ID: TF_LIB3242-570-P1-K1-C9.pep
SIVAAVIYIITQLSDDKKPPKDISVATGVAEGTIRNSYKDLYPHVSKIIPSWYAKEEDLKNLSSP

SEQ ID NO: 32694 - protein, 47 aa, Glycine max
  Clone ID: TF_11689812.pep
AACLYIDCRRDNEPRTVNEICSVANGASQKEIGRAQEYIVTQLDWEN

SEQ ID NO: 32695 - protein, 137 aa, Glycine max
  unsure (1)..(137): unsure at all Xaa locations
  Clone ID: TF_GmC615_2.pep
NGATKKEIGRAKEYIVXXLGLENGNAVEMGTIHAGDFMRRFCSNLCMNNQAVKAAQEAVQKSEEFDIRRSPISIAAAVIYIITQLSDDKKPLKDISLATGVAEGTIRNSYKDLYPHVSKIIPNWYAKEEDLKNLCSP

SEQ ID NO: 32696 - protein, 223 aa, Glycine max
  Clone ID: TF_GmC299358_1.pep
RPSDHRRVRKSWRTKVEEIVDSHMRKIIQTQDAWMERMLSVVEQREQEMASREEERKRKESMWFDQQVHELWAKEKAWVEARDAALIEVVRKHIGIGIGLEALPLVEEESPNKNKSQGSIDANEFPSEGVDPGRSSSSRWTEMEISNLMQLRTSFEQRFRENNNGYMENGVWDEIAAKMACLGFDRSASECKQIWEEISISLRRTVDECDDGAKEGLGIWDLS

SEQ ID NO: 32697 - protein, 326 aa, Glycine max
  Clone ID: TF_GmC134585_1.pep
RKESRDVDGFRAGVGQNRNTNGVDGGDEGGKAPRLPRWTRQEILVLIQGKRDAENKFRRGRTAGLAFGSGQVEPKWASVSSYCRKHGVNRGPVQCRKRWSNLAGDYKKIKEWESQIRDETESFWVMRNDLRRERKLAGFFDKEVYDILDSLPTTLALSLSSSPPPTTTITTTTVPDDPPHLYDSNRSAPGDGEDGLLSDFEQDEEKNPPSNKDIPAPIPISEKQYLRRCQAEDVTNEKQSTSNPEMGSTSQGERKRKRLATDGEEETLQYQLIDVLERNGKMLSAQLEAQNINFQLDREQRKDHASNLVAVLDKLADALGRIADKL

SEQ ID NO: 32698 - protein, 276 aa, Glycine max
  Clone ID: TF_GmC134585_2.pep
MALEQEGQNRNTNGVVDAGDEGGKAPRLPRWTRQEILVLIQGKRDAENKFRRGRTAGLPFGSGQVEPKWASVSSYCRKHGVNRGPVQCRKRWSNLAGDYKKIKEWESQIREETESFWVMRNDLRRERKLPGFFDKEVYDILDSPAALALALSSSSPPPPTTTKTITLPAEEPLPHLYDSNRSAPGDGEDGLFSDFEQDEVAASSKKNKDIPAPIPISEKLYQPLLRRCQAEDVTNEKQSTSNPEMGSTSQGERKRKRLATDGEEETLQYQLIDVLE

SEQ ID NO: 32699 - protein, 132 aa, Glycine max
  Clone ID: TF_GmC61615_1.pep
VHFLFLFLSHYCLWGEDMGDPYGLPEDLRRLIPARSTHLNPSNTHLLEPLCLHHGLSSAVSSATTPHTSFDPNMVGDVFFPRGFTHHFAHHHDYSSSSGVNPVVTCYCCCYYYCLGSCILQHGKCKERVVWV

SEQ ID NO: 32700 - protein, 52 aa, Glycine max
  Clone ID: TF_LIB4391-037-R1-K1-H3.pep
KKKYYILTKFFDMIEISYFSRIERRNLTGQPGLVKWVIKKHSWMKKKKKKKN

SEQ ID NO: 32701 - protein, 213 aa, Glycine max
  Clone ID: TF_GmC247_2.pep
MGWGRFVERDVDEKVMDTDDYATGLYAGDDADGEKLARKVGPEIMNQLTEGFEEMTSRVLPSPLEDEFLDALDINYAIEFEPEYLVEFDNPDIDEKEPISLRDALEKAKPFLMSYEGIQSQEEWEEIMEETMARVPLLKKIIDHYSGPDRVTAKKQQEELERVAKTLPGSVPSSVKQFTNRAVISLQSNPGWGFDKKCHFMDKLVWEVSQHYK

SEQ ID NO: 32702 - protein, 119 aa, Glycine max
  unsure (1)..(119): unsure at all Xaa locations
  Clone ID: TF_jC-gmXLIB3563P080cd01a2.pep
TFVGRWDYLIDSPLLGDSAVLGTGGGGSGDAVAAAPPAASGGAHDGVVDGGVGGGGGSHPGDDRVDECETSFGGNRWPMXDTLALLXVRPDMDVAFLDACVLGPLWGEVSRSLAELGFH

SEQ ID NO: 32703 - protein, 61 aa, Glycine max
  unsure (1)..(61): unsure at all Xaa locations
  Clone ID: TF_GmC1630_1.pep
MFPCNRSQLVYLRIKDGTVPVXFFQKYLLKKLNIASGAEVEIMCRGQPVLPSVQLHNLVDL

SEQ ID NO: 32704 - protein, 99 aa, Glycine max
  Clone ID: TF_LIB4164-058-R1-N1-E11.pep
METSGEAVAAHGGGEVIMMDANSGEEENNNHNNKGKLEEGGGEEEEGDNKINNSCGGNRWPRQETLALLKIRSDMDVVFRDSSLKGPLWEEVARYTTHI

SEQ ID NO: 32705 - protein, 375 aa, Glycine max
  unsure (1)..(375): unsure at all Xaa locations
  Clone ID: TF_GmC1402_6.pep
MEPNALGGGIFPNISSGLLGVENPLQQQPNLQNQQNPHPLHHPQMVSYATNHDTDTHHQQQPPQQPIKHGYNFSAIKSNKSQSTLSDEDEPVFTAEDNCSGDPKRKVSPWHRMKWTDTMVKLLIMAVHSTGDEAGSECTDPTKKKASGLLQKKGKWKSVSKGMMEKGYYVSPQQCEDKFNDLNKRYKRVNDILGKGTACRVVENQTLLDTMDLSPKMKEEVRKLLNSKHLFFREMCAYHNSCGHNXQLWQYFQRATINRGSTTTSTSTAAVFALIRERGGESEXMLKEDEDEDDDSEEFSDEDEEESGEGGSRGMEEDENDVIRRRARNKGGXGVSSSQMMQQLSGEVSGVLQDGGKSAXEKKQWMKKRGVQLEE

SEQ ID NO: 32706 - protein, 66 aa, Glycine max
  Clone ID: TF_LIB3242-239-Q1-J1-C9.pep
DKPRRKLSSLSLSLFFFSFFVFSLCIRKMAELGYHRSSKKCKEKFENVYKYHKRTKEGRSGKQDGK

SEQ ID NO: 32707 - protein, 184 aa, Glycine max
  Clone ID: TF_GmC429768_1.pep
MEMEDHHQYGIADLRQLVNGPRPTHFPAMPPQPKAELFPGGGGGHPNLQAATQQHYEMMMFGRQVADIIPRCLHDFAPTDSATNIAVATPTTTTSASTPPLSCLEAETAGCIGGDASTGRWPRQETLTLLEIRSRLDSKFKEANQKGPLWVEVSRYHFKHYSLLFSTLTSENYNYLFGWFFAWD

SEQ ID NO: 32708 - protein, 364 aa, Glycine max
  Clone ID: TF_GmC1402_2.pep
TDTMVRLLIMAVYYIGDEAGSEGTDKKKSSGLMQKKGKWKSVSRAMMEKGFYVSPQQCEDKFNDLNKRYKRVNDILGKGTSCRVVENQSLLDSMDLSPKMKEEVKKLLNSKHLFFREMCAYHNSCGHGNNNAPQQGESGGEVSQPQAQPHHHQQQQQQPQQRCFHSSEVGNLGGSGVEGLRMLKVGNGEEGDDDSEDDDDSEDDSDEDEDDSGEGGSRGHVGHGHEDIEDENDGRSMRKRARKVGGVSMSPQLMQQLSAEVSGVFQDVGKSAWDKKQWMRSRIMQLEEQQISYHTQAFELEKQRLKWARFSSKKEREMETAKLENERRRLENERMVLLIRQKEFELMSLQHQQQQQHQQQHSST

SEQ ID NO: 32709 - protein, 444 aa, Glycine max
  Clone ID: TF_GmC1516_1.pep
MEGNLPQGGIIQGGTSFGGFDLPGSIRVQHQAQHPHSMHQHQTHPRQGSSVHSAVHDGFPLTMGTMQNCDQTISLADFSKGDRSKNSASEEDEPSYTEDGVDCHHETTRGKKGSPWQRVKWTDKMVKLLITAVSYIGEDVTADGGSSGRRKFAVLQKKAQWKSVSKVMAERGYHVSPQQCEDKFNDLNKRYKKLNDMLGRGTSCQVVENPVLLDVIDFLSEKEKDDVRKILSSKHLFYEEMCSYHNGNRLHLPHDPALQRSLQLALRNRDDHDDDMRRSHHDEDDQDVEIDDHDDFEENCASHGDSRGIYGPLGGSMKKLKQCQGQEDANTFGNSLNCQDYNKSSYPHGQMIPSDVNQGLPEGMKAAWLQKQWVESRTLQLEEQKLQIQVEMLELEKQRFKWQRFSKKKDRELEKLSLENERMKLENERISLELKRKEMGTGFK

SEQ ID NO: 32710 - protein, 61 aa, Glycine max
  unsure (1)..(61): unsure at all Xaa locations
  Clone ID: TF_LIB3242-558-P1-J1-A8.pep
RKLAELGYNRNAKKCKEKGENVYKFHKRTKEGRSGKSVGXTYRXQEQIQALENNPAIHGKQ

SEQ ID NO: 32711 - protein, 150 aa, Glycine max
  unsure (1)..(150): unsure at all Xaa locations
  Clone ID: TF_GmC5795_2.pep
GNWLVLWNFGAAATAITTTPSSLSSLSSSRWPKTEVHALIRLRTSLETKYQENGPKAPLWEDISAGMLRLGYNRSAKRCKEKWENINKYFKKVKESNKQRREDXKTCPYFNELEALYKEKSKTQNPFGASFHNMKPHEMMEPLMVQPEQQ

SEQ ID NO: 32712 - protein, 604 aa, Glycine max
  Clone ID: TF_GmC517_1.pep
MHTTIFGRPPLLFRLFIAPRPPLPLHLSLPLLPHASSSPPPPTLPPLPPSTPAPHPLAPSPLSHQPLLPPPPSPPPQHPLGPVPVRIRKMILGIQRDQRQLPDQLTDSWTNDEVLALFRIRSSMENWLPELTWDHVSRRLAEVGFKKSAEKCKEKFEDESRYFDNINNYGKNNFRFLISELEELCQNSDPGAHDHNGVVVRSEKTHHLGGHALEENSRDIETTTATKRCDIGSDTVVEKSNSKVRKRKRRDRFEMFKGFCESVVNKMMAQQEETHNKLLEDMVKRDQEKFAREEAWKKQELDRMKKELEIMAQEQAIAGDRQATIIEFLKKCATTTITSLSPPSQNAKYYITNDSNLPNCASHSQNPNNPSNEDNNLEPTPSSKMIQNHGQTTLGAENPSTSDTLLQVPSSSNSSPTTHNPSSSLNSHNNIIPLESNSVSTYKPTSTTPMASSENSKDDMGRRWPRDEVLALINLRCTSLSSNEEKEGNKGPLWERISQGMSALGYKRSAKRCKEKWENINKYFRKTKDNVNKKRSLNSRTCPYFHQLSCLYGQGKIVPQSEREGNYCLNPTPNSGQVPPDDDHQVQDDESSQVGSAGLVQYAC

SEQ ID NO: 32713 - protein, 279 aa, Glycine max
  unsure (1)..(279): unsure at all Xaa locations
  Clone ID: TF_GmC36_2.pep
GLSEQQNLGQALTNINLVQPQPQLQPQPPVQQQVTPPNIVPAPMQQPLPVIVTQPVVLPVVSQVTNMEIMKADNNNNNNNNNNCENFLPPSSSRWPKVEVQALIKLRTSMDEKYQENGPKGPLWEEISASMKKLGYNRNAKRCKEKWENINKYFKKVKESNMRRPEDSMTCPYFHQLDALYRQKHKAEESTEAEKAESGGGPMMVXPEQQWPPQQQDDRDITMEDMENEYDEYEEEREGEEEEEEDEQEEEGGGGNYEIVANKTSGGGGAAASVGASTE

SEQ ID NO: 32714 - protein, 667 aa, Glycine max
  unsure (1)..(667): unsure at all Xaa locations
  Clone ID: TF_GmC36_1.pep
MLGDSAVLGAGGGGGGGRGGGVESGASADAVAATVTVTHDVATTTGGGGGGSNNSGDDERGRIEEGERSFGGNRWPRQETLALLRIRSDMDVAFRDASVKGPLWEEVSRKMAELGYHRSSKKCKEKFENVYKYHKRTKEGRSGKQDGKTYRFFDQLQALENHSPTPHSPNPSPKPPQSAPSRVVASSVSLPIATTTTVSLPIPTPTTVPMQPILSNNAILTSSVPNITVPSTTPLPITIPQPILTSPSINLTIPSYPPTNPTNFPPPPNPTLPSSFPTDTFSNSSSSSTSSEETLEGRRKRKRKWKDFFERLMKEVSEGQEELQKKFLEAIEKREDDRIAREEAWRVQEMKRINREREILAQERSIAAAKDAAVMSFLQKIAEQQNLGQVSTNINLVQQPQPQLQPQPPLQQQVTQPSIAAAQPPVQQPPPVVVTQPVVLPVVSQVTNMEIVKADIIVTTXNNGENFLAPSSSRWPKVEVQALIKLRTSMDEKYQENGPKGPLWEEISASMKKLGYNRNAKRCKEKWENINKYFKKVKESNKRRPEDSKTCPYFHQLDALYRQKHRGEESPAAVEAKPESAVAPLMVQPEQQWPPQQQQQDRDITMEDMENEDDEYEEEREGEEELEDDEDEEDEEGGGGGGNYEIVANKTSGGGGASAASVGASTE

SEQ ID NO: 32715 - protein, 522 aa, Glycine max
  Clone ID: TF_GmC247_1.pep
MQFFEIQVLKVHFGKKFQGNWQNLDIKEAQRSARKNLRTCTSTTREPKRTKVANHMEKPINSLINYKPLRTNSQVSYPPKPQPTSTLATTNPLTLPTRPSDHGNKVISYVTTFPSTNPTLISPSPQTNTTTTTTTTTSTTNPRDSSRPQTNNNNNSVTHSLPNMNTSFSTTTASTSSSTASDEDLEERYRRKRKWKDYFRRLTRKVLLKQEEMQKKFLEAMDQRERERVAQQDNWRMQEMARINREHEILVQERSTAAAKDATVIALLQKMYGQQNPTQQVEVEPPPQQKQTIPQSLPPILMPNNNFEVKKINNGHSVTSTTTGTVATATTTTSPVNSSSSRWPKAEVHALIRIRTSLETKYQENGPKAPLWEDISIAMQRLGYNRSAKRCKEKWENINKYFKRVRESSKERREDSKTCPYFHELEALYKEKSKSSKNPFGIFQNMKPNEMMLMMTEPLMVQPEQQWRPPPQSLEEGVGMENASEEYHENEENGGDDDDNIEEDGDSVEDEGANPCEIATNN

SEQ ID NO: 32716 - protein, 464 aa, Glycine max
  unsure (1)..(464): unsure at all Xaa locations
  Clone ID: TF_GmC1404_2.pep
MPLPLPPVSNNNNNTTVPSTTSLPMPQSILNITPPSTLNITIPSFPPSNPTTYFPTQTPNPTSNNNNNPPSTITPPSFPNFPADLLSNSSSSSTSSEETPTTEARGRKRKRKWKDFFERLMKEVIEKQEELQRRFLEAIEKREQERVVREEAWRMQEMQRINREREILAQERSIAAAKDAAVMTFLQKIAEHQQQETINLEPALNNNSITVVPQQPVPQATPTSTPTPQQAQTTTVPEAPQVQPLVPQLQQQQQIVVSNVEINKADNNGENLMMEASSSRWPKVEVQALINLRTSLETKYQESGPKGPLWEEISALMRKMGYNRNAKRCKEKWENINKYFKKVKESNKKRPEDSKTCPYFHQLEALYREKNKGEGQMKPESMMAPLMVQPEQQWPPQTTLVVPPEVTMGDTQNDPXMDRQYHEENEDDEDDKEIGDEDEDEDDEGGDNYEIVASKPATADASGE

SEQ ID NO: 32717 - protein, 308 aa, Glycine max
  Clone ID: TF_GmC25141_1.pep
MFGGGGEDALAARLGMMPPSLLNPASVMSGEMSPAVPAAREERGPAQPQWSQQETREFIAIRAELERDFTASKRNKTLWEVVSAKMRERGFRRSPEQCKCKWKNLVNRYKGKETSDPEHGKQCPFFEELHAVFTQRAHNMQRLLLESETRSAHTKKGVKRSSGDRSSEELSEDDNEVEYDSEEEKPSRSNTRKTKVDKVGVEKSSRASNPSNSASNSTSIQEMLKEFFQHQLSMEMQWREMIERRAHERQLFEQEFIKSLKKLERERLMIEQAWREREEQRRMREESRAERRDALLTTLLNKLINESN

SEQ ID NO: 32718 - protein, 552 aa, Glycine max
  unsure (1)..(552): unsure at all Xaa locations
  Clone ID: TF_GmC1404_3.pep
MDVAFRDASVKGPLWEEVSRKLAELGYHRNAKKCKEKFENVYKYHKRTKEGRSGKSEGKTYRFFDQLQALENNPSIHAMQSPTPTPSKPPQTTALLATPVSIVVTTTTTPSTLVSNNATVPSTNTPPLPQAILNITPPSTLNITTPSFPSSNPTTYFPTQTPNPTTNNNPPNTITPASFPNFSADLLSNSSFSSTSSEETTTMGGGGMRRKRKRKWKDFFERLMKEVIEKQEGLQRRFLEAIEKREQERVVREEAWRMQEMQRINREREILAQERSIAAAKDAAVMTFLQKIAEHQQQEINLEPALNNNNNSITVVPQQPVPQTTTTPTPTPQQAQTTIVPEAPQPQQQIVVSNVENNKADNNGENLTMGASSSRWPKMEVQALINLRTSLETKYQENGPKGPLWEEISALMRKMGYNRNAKRCKKKCXNINKYFKKVKESSKKRPEDSKTCPYFHQLEALYREKNKREGQMKPDSMMAPLMVQPEQQWPPQTHVVPPEVTMGDAQNDPMDRRHEEVEEDEADKEIGDEDEDEDDEGSDNYEIVASKPASGE

SEQ ID NO: 32719 - protein, 295 aa, Glycine max
  unsure (1)..(295): unsure at all Xaa locations
  Clone ID: TF_GmC325_1.pep
MEGHHLHHHHRQQQQQQHHHQQQHQQQQHHHHPHHNITTSNVDATDRFPQWSIQETKEFLMIRAELDQTFMDTKRNKQLWEVISTRMKEKGFHKSAEQCKCKWKNLVTRYKIXKGCETMEPEATRQQFPFYNELQAIFAARMQRMLWAEAEGGSNKKKVHLSSEDEEEGNEETSEGDHKGNITSKKKKKGKMVIGGGGSGNNNLESLKEIMDEFMRQQMQMEAQWMEAFEARENERRLKEMEWRQTMEALENERLMMDQRWREREEQRRIREEVRADKRDALITALLNKLRREEM

SEQ ID NO: 32720 - protein, 234 aa, Glycine max
  Clone ID: TF_GmC325_2.pep
MEGHHLHHRQQQLQQHHHPHHNITTSNVDATDRFPQWSIQETKEFLVIRAELDQTFMETKRNKQLWEVISNRMKEKGFHRSAEQCKCKWKNLVTRYKGCETMEPEAMRQQFPFYNELQAIFAARMQRMLWAEAEGGSNNKKKGMHLSSDDEEEGNEEMMSEGDHKGNIIISKKNKKKGKMVIGVGGSGNNNNNSSSSSNNLEREEQRRIREEVRADKRDALITALLNKLRREEM

SEQ ID NO: 32721 - protein, 138 aa, Glycine max
  Clone ID: TF_LIB3242-060-Q1-J1-B12.pep
SHKAFSFVFFTLSSFGVIVIRKLAELGYNRNAKKCKEKFENVYKYHKRTKEGRSGKSEGKTYRFFDQLQALENNPAIHGKQSPTPPKPPPQTTALSATPVSIVVTTTTTTPSSIIMPLPLPPVSNNNNNTTVPSTTSL

SEQ ID NO: 32722 - protein, 499 aa, Glycine max
  Clone ID: TF_GmC247_4.pep
EVSRKLAELGYQRSAKKCKEKFENVYKYNKRTKENKSGKSHGKAYKFFDQLQALENQFTVSYPPKPQPTSTLTTTNTLTSDHGNKVISYVTPFPSTNPTLIPPSPQTNTNTTTTTTTTSTTDPRDSSPPQTNNNNNSVPHSLPNMNAPFLTTTTSTSSSTASDEDLEERYRRKRKWKDYFRRLTRKVLLKQEEMQKKFLEAMDQRERERVAQQDNWRMQEMARINREHEILVQERSTASAKDAAVIALLQKMYGQQNPTQHVEVEPPQQQKQTMPQSQPPILMPNNNFEVKKMNNGHSATSTTTTTTSPVSSSSSSRWPKAEVHDLIRLRTSLEIKYQENGPKAPLWEDISIAMQRLGYNRSAKRCKEKWENINKYFKKVRESSKERREDSKTCPYFHELEALYKEKGKSQNPFGMFQNMTPNETMMMEPLMVQPEQQWRPPPQSLEEGIGKDNASEEYNQEKEEEVEENGGDDDDNIEEDGDSVEDAGPNPCEIATNN

SEQ ID NO: 32723 - protein, 97 aa, Glycine max
  unsure (1)..(97): unsure at all Xaa locations
  Clone ID: TF_LIB3242-366-Q1-J1-B12.pep
MLGDSALLGGGGGEGGASADVVAATATHDATTTTTTGGGGGGSNNSGDDERGRIEEGERSFGGNRWPRQETXAXLRIRSDMDVAFRDASVKSPLWEE

SEQ ID NO: 32724 - protein, 257 aa, Glycine max
  Clone ID: TF_GmC1796_2.pep
MLEISTLPETATENADGGSAAVSDGSKAEHSEDGDRNSAANRWPREETMALLKIRSEMDVAFKDANPKAPLWEQVSRSLAELGYNRSAKKCKEKFENVYKYHRRTKEGRFGKSNGAKTYRFFEQLEALDGNHSLPPPTTTTDNNNNVDDDDVILNAVPCSVIAAAAHEHSSSTTSSSGKMKRKLTRFLEGLMREVIEKQETLQRKFMEVLDKCEKDRMAREEAWNKEELERIKKERELLAHERSIAACKDEAVLVFL

SEQ ID NO: 32725 - protein, 193 aa, Glycine max
  Clone ID: TF_GmC4164_1.pep
IPGVDPRVRNTASGPEGYLSEEDNTASGAEGDLSESEDSDEFWKPFITSLPVEKSINADNGYVSPKEQKSNLKKDESEDIDEAKSEETSNSEAKSSKSVKRNKWKTEEVKKLIGMREELSERFQVVKGRMALWEEISQKLLADGICRSPGQCKSLWTSLVVKYEGIKNEDRKKSWPYIEDMERIMSDKEAPAK

SEQ ID NO: 32726 - protein, 186 aa, Glycine max
  Clone ID: TF_GmC1059_2.pep
VTGIQNHSENQNEDGSEILNSTTARGAESWTESEIARLQQLRAEMETRYMQSGCSEEVMWEEIATKMACFGYERSAVVFKEKWESISNYARSVKDGSKKRKEDSRSCFYFDNSDQSSLYNQGGAYCDINDQRHKTGRLQTNDGSSPSNSNVGNTVALDNCFPFLMTESGNLWENYSLKVNKASQNQ

SEQ ID NO: 32727 - protein, 151 aa, Glycine max
  unsure (1)..(151): unsure at all Xaa locations
  Clone ID: TF_GmC429768_2.pep
MEMEDHHRHHHQYGITDLRQLVNGPRPTHFPTMPPPPKAELFPGDSNLQAATQQHYEMMMFGRQVADIMPPRCLHDFASTDSATNIAVATPTTTPSAFTPLSCLEAETAGCIGGDASTGRWPRQETLTLLEIRSRLDSKFKEANXKGPLWD

SEQ ID NO: 32728 - protein, 148 aa, Glycine max
  unsure (1)..(148): unsure at all Xaa locations
  Clone ID: TF_LIB4366-014-R1-N1-D5.pep
VLALINLRCTSVNNNTXNEEKEGNNKVPLWERISQGMSELRYKRSAKRCKEKWENINKYFRKTKDITKKRSLDSRTCPYFHQLSSLYNQGKLVLQSESHLNNTPPDQNPEQVKPDQTTQAHESSSQVGSGSGFSVQQQQVPSLDFDQF

SEQ ID NO: 32729 - protein, 422 aa, Glycine max
  unsure (1)..(422): unsure at all Xaa locations
  Clone ID: TF_GmC1059_1.pep
SSRIGSRSGKKCREKFENLYKYYKKTKEGKAGRQDGKHYRFFRQLEALYGENSNQASVPETNFGSGSLRFHTSSRANXPRETNQEMFQSQKHCDSLSLTNFTDLDTSSSDDNDQNSTGRELNKDNDSMEKRRKRVSGRSWKVKIKDFIDSQMRKLVEKQEEWLDKLTKTLEQKEKERVLREEEWRRQESVRLEREHKFWAKERAWIEARDAALMEALHKLTRNEIMKSTHSHEGLMVTGIQNHSENQNEDGSEILNSTTARGAESWTESEIARLQQLRAEMETRYMQSGCSEEVMWEEIATKMACFGYERSAVVFKEKWESISNYARSVKDGSKKRKEDSRSCFYFDNSDQSSLYNQGGAYCDINDQRHKTGRLQTNDGSSPSNSNVGNAVAGDNCFPFLMTESGNLWENYSLKVNKACQNQ

SEQ ID NO: 32730 - protein, 348 aa, Glycine max
  Clone ID: TF_GmC5795_1.pep
RRAAPSVATSPTTPPPSGASCHIPKPPVLIVPKIVPPAQQWRPPTQDEQGAAKEHKNSEWKEREEGVEGEDDDENEEGDKEKWEDIDNNVKEVVAQQEAWRVQDMARINRKHELLVQERSTAAAKNVAVIAFLQQLSGQHQNSTVTQAQLNFPQQPPPQKVTIVQPPPQQAPQPQAPLVLSNSDNMEIQKMNNGHSVVTATVTATATPTPTTTFVAAATAITTTPSSLSSLSSSRWPKTEVHALIRLRTSLETKYQENGPKAPLWEDISAGMLRLGYNRSAKRCKEKWENIIKYFKKVKESNKQRREDSKTCPYFNELEALYKEGSKTQNPFGASFHNMKPHEMMEDR

SEQ ID NO: 32731 - protein, 655 aa, Glycine max
  Clone ID: TF_GmC1404_1.pep
MLGDSAVLGTGGGGSGDAVAAAPPAASGGAHDGGVDGGDGGGGGSNSGDDRVEEGERSFGGNRWPKQETLALLKIRSDMDVAFRDASVKGPLWEEVSRKLAELGYNRNAKKCKEKFENVYKYHKRTKEGRSGKSEGKTYRFFDQLQALENNPAIHGKQSPTPPKPPPQTTALSATPVSIVVTTTTTTPSSIIMPLPLPPVSNNNNNTTVPSTTSLPMPQSILNITPPSTLNITIPSFPPSNPTTYFPTQTPNPTSNNNNNPPSTITPPSFPNFPADLLSNSSSSSTSSEETPTTEARGRKRKRKWKDFFERLMKEVIEKQEELQRRFLEAIEKREQERVVREEAWRMQEMQRINREREILAQERSIAAAKDAAVMTFLQKIAEHQQQETINLEPALNNNSITVVPQQPVPQATPTSTPTPQQAQTTTVPEAPQVQPLVPQLQQQQQIVVSNVEINKADNNGENLMMEASSSRWPKVEVQALINLRTSLETKYQESGPKGPLWEEISALMRKMGYNRNAKRCKEKWENINKYFKKVKESNKKRPEDSKTCPYFHQLEALYREKNKGEGQMKPESMMAPLMVQPEQQWPPQTTLVVPPEVTMGDTQNDPMDRQYHEENEDDEDDKEIGDEDEDEDDEGGDNYEIVASKPATADASGE

SEQ ID NO: 32732 - protein, 608 aa, Glycine max
  Clone ID: TF_GmC696_1.pep
MKEEVKKREVETQNTNTNMFDGVPDQFHQFITPRTSLPLHLPFPLHTSGGTPNTTTFPSNFDPYNHPHQLPLQPNNLLHPLHHKDEDKEENTTVPMNLEIQRDQRQQLPELIDPWNNDEVLALLRIRSSMESWFPELTWEHVSRKLAELGYKRSAEKCKEKFEEESRYFNNINYGKNNNNNNNSSNYRFLSELEQLYHQGGSGDHHLENTTQPPLQKQDKMGHHALELEVEGDSRNVVDALVTKQNEQSDEALAVEKITKDRKRKRPDRFEMFKCFCESIVHKIMAQQEEMHNKLLEDMMKRDDEKFTREEAWKKQEIEKMNKELEMMAREQAIAGDRQANIIQILNKFSATSSPASHTLKKVNNDSNLNIHITQNPNPSQTENPTLSVAQDTLQVIPSTSSTSTPALPQNPSSYSLNIQNNNNNIPVETNSVLNKGNEKDDVGRRWPKDEVLTLINLRCTSVNNNNNEEKEGNNKVPLWERISQGMLELGYKRSAKRCKEKWENINKYFRKTKDVNKKRSLDSRTCPYFHQLSSLYNQGKPVLQSESHLNSPPNQNPEQVTPDQTTQAHESSSQVGSGGGFSVQQQQVDHGGEKTLMQVPSLDFDQF

SEQ ID NO: 32733 - protein, 374 aa, Glycine max
  Clone ID: TF_GmC1490_1.pep
MYLSEKPRPIDFYKEEGARDMMIEVVSNGDLPPPPPPPPMILGESSGEDPEVEIKAPKKRAETWVQDETRSLIGLRREMDALFNTSKSNKHLWEQISAKMREKGFDRSPTMCTDKWRNLLKEFKKAKHQDRGSGSAKMSYYKEIDEILRERSKNVQYKSPTPPPKVDSFMQFADKGIDDTSISFGPVEATGRPTLNLERSLDHDGHPLAITTADAVAASGVPPWNWRETPGNGGESQSCCGRVISVKWGDYTRRIGIDGTPEAIKEAIRAAFRLRTKRTFWLEDEDQIIRSIDREMPLGNYTLHIDEGMAIKLPLYDEPDHIPVHTEDKIFYTEDDFRDFLTRRGWICLREFDSYRNIDNMDDLRPGAIYRGVS

SEQ ID NO: 32734 - protein, 489 aa, Glycine max
  unsure (1)..(489): unsure at all Xaa locations
  Clone ID: TF_GmC1796_1.pep
MLEISTLPETATENADGGSAAVSDGSKAEHSEDDDRNPAANRWPREETMALLNIRSEMDVAFKDANPKAPLWEQVSRKLSELGYNRSAKKCKEKFENIYKYHRRTKEGRFGKSNGAKTYRFFEQLEALDGNHSLLPPTTTVGDDVVLNAVPCSVSAAAHEHSSSTTSCSGKKKRKLTQFLEGLMREVIEKQETLQRKFVEVLDKCEKDRMAREEAWKKEELERIKKERELLAQERSIAAAKDEAVLAFLRKFAEAEDTVQLLEKIQVQNDKQKNMKQNGGNDNANGGGGVTVVTDMDKQECGNTNXRVSVGNFVHMSSSRWPKDEVEALIRLRTEFDVQAQGNNNNSNNGSKGPLWEEISLAMKSIGEVQVKWENINKYFKRIEMGEHNFCLSQPLHEETCPYYHHPEALYSKKPKKVDHGNELKPEELLMHIMVSQSQEQQQQQEMQTQTQSPSEDAERDQNQGDNEDQSEYQNQMVDNNSPSIAIMS

SEQ ID NO: 32735 - protein, 112 aa, Glycine max
  Clone ID: TF_LIB3050-002-Q1-E1-G8.pep
ENINKYFKRIKEKSKRKPQDSKTCPYYHHLEALYSKKPKKVDLGNELKPEELLMHIMVSQSQEQQQQQEMQTQTQSPSEDAERDQNQGDNEDQSEYQNQMVDNNSPSIAIMS

SEQ ID NO: 32736 - protein, 524 aa, Glycine max
  unsure (1)..(524): unsure at all Xaa locations
  Clone ID: TF_GmC1764_1.pep
PIDPSTLVKAEDIDAYAPKDLLIVTTGSQAEPXAALNLASYGSSHAFKLAKEDVVLYSAKVIPGNESRVMKMLNRISEIGSTIVMGKNEGLHTSGHAYRGELEEILRIVKPQHFLPIHGELLFLKEHELLGKSTGIRHTAVIKNGEMLGVSHLRNRRVLSNGFISLGKENLQLMYSDGDRAFGTSSDLFIDERLKIALDGIIVISMEIFRPQNLDSPVENTLKGKIRITTRCLWLDKGKLLDALHKAAHAALASCPVSCPLAHMEKIVSEMLRKMVRKYSGKRPEVIAIAIENPAAVLANEINTKLSGKLNVDGMSALRKVVDGHEKENQRTEMQIRDRIDVGGLLPTKDNAISSGAEDGLSDAEDPNDYFKPFVESSPVEKSIKTNNGYVPRKEKSSPLKDDCSEDTEECNSVNTSDSEPKSSKSAKRNKWKHEEVKKLIDMRGELNDRFQVVKGRMALWEEISQNLLANGISRSPGQCKSLWTSLLQKYEQEVKNEKKNKKKWPYFEDMERILADNKTLETK

SEQ ID NO: 32737 - protein, 155 aa, Glycine max
  Clone ID: TF_GmC1490_2.pep
MYLSEKPRPIDFYKEEGARDMMIEVVSNGDLPPPPPPPPPPMILGESSGEDPEVEIKAPKKRAETWVQDETRSLIGLRREMDSLFNTSKSNKHLWEQISAKMREKGFDRSPTMCTDKWRNLLKEFKKAKHQDRGSGSAKMSYYKEIDEILRERSK

SEQ ID NO: 32738 - protein, 338 aa, Glycine max
  Clone ID: TF_GmC4079_1.pep
MDLFTGDHFPVPDHVAPFPDSGDLLFAADLLSHRHNPQKFRPIRSVPTAPIANPSPPPLSHDPIPSGSGHAPCHESSLSFDAEDEDEDDDNSSASTKGHGPRKKRRKMVRKLEDFAKDLVVKVMEKQEQMHKQLLEIIENNERERIKREAAWKNEEMERIRKDEEARAQENSRNLALISFIQNLLGHEIQIPQQPAKPCSKREEDEVEASARKELNNDPGDNRWPDVEVQSLITVRTSLEHKFRLMGSKGTIWEEISEAMNGMGYNRSAKKCKEKWENINKYYKRTIGSGKKRRQNSKTCPYFDELDILYRKGLLSIGNALSNTCGVPQIEVKELNET

SEQ ID NO: 32739 - protein, 45 aa, Glycine max
  Clone ID: TF_jC-gmro02910048f02a1.pep
ARALHRSVAEPRIIVQTTSEVNLLDDGYRWRKYGQKVVKGNPYPR

SEQ ID NO: 32740 - protein, 47 aa, Glycine max
  Clone ID: TF_GmC1323_2.pep
TSVRGCPARKHVERAVDDSNMLVVTYEGEHNHSQIASEVANVILESS

SEQ ID NO: 32741 - protein, 169 aa, Glycine max
  Clone ID: TF_GmC328634_1.pep
LQREPRCRGGENCKLRTMLDQITKNYNQLQLFIALQKQKQCQKMETNLNGMMFGQHLLDPRGPFTKLDAQVAPFADDKSGQRGHPETDPVEDVLEQSTSQSWGSSKSPKFEESNSSELPLKKTRVSVRARSEAPLISDGCQWRKYGQKIAKGNPGPRAYYRCTMAVGCP

SEQ ID NO: 32742 - protein, 69 aa, Glycine max
  Clone ID: TF_GmC273044_1.pep
VSSILIFVNYSYCRCSYRGCNVKKQIQRHTKDEEIVVTTYEGMHIHPVQKSTESFEHILRNDHIYSLTL

SEQ ID NO: 32743 - protein, 162 aa, Glycine max
  Clone ID: TF_jC-gmst024140b12a1.pep
GSRVITFFTNTGCPFRKHVVRASHDPKAVITTYEGKHNHDVPTARNSCHDMAGPASACGQTRVRPEESDTISLDLGMGISPAAENTSNSQGRMMLTEFGDSQIHTSNSNFKFVHTTTAPGYFGVLNNNSNPYGSKENPSDGPSVNHSAYSCPQNIWRILMGH

SEQ ID NO: 32744 - protein, 167 aa, Glycine max
  Clone ID: TF_GmC943_1.pep
ISSASNSAAEKETVGSRYKWVSRVAFRSTQGCWATKQVQRSDEDPTMFDITYRGNHTCSQGNNAVLPPKSPEKHEKPAHSHNIDIHHAQASQESLAKFRKSNYFPSPTFQMNEFDGIYNRSHSKSDINEIISTNTSATNSPIPDFNFSLDPVEIDPNFPFNTPGFLC

SEQ ID NO: 32745 - protein, 167 aa, Glycine max
  Clone ID: TF_GmC94_3.pep
IDIYLDLSIFRNYYRCTHKFDQGCQATKQVQRVQEEPILYKTTYYGLHTCKNLANPEIILDPMSPSSSSKFLSFDNSFPTPSKQECPFLSSSNLPSSVKGECKEEVPPSTSSNHYLISSDLTFDSSPRHHVTLSSTLDSEYKSVDISDVLYDSAQLDDAFEPFLEFR

SEQ ID NO: 32746 - protein, 69 aa, Glycine max
  Clone ID: TF_GmC1329_2.pep
FGSRENENDGHSYSSAGSRTVKEPRVVVQTTSEIDILDDGYRWRKYGQKVVKGNPNPRYFHLLDFNRRV

SEQ ID NO: 32747 - protein, 80 aa, Glycine max
  Clone ID: TF_LIB3242-323-Q1-J1-D7.pep
QQQPWSYQETTKQDNFSSGKSMMKTEKSSSMQSFSPEIASVQNNHSNGFQSDYGNYPPQSQTLSRRSDDGYNWRKYGQNK

SEQ ID NO: 32748 - protein, 265 aa, Glycine max
  Clone ID: TF_GmC1330_3.pep
VVFRTRMEEAASAGLKSMEHLIRLLSPTSYNSNSSSSPLLNTNPNNLHCSQITDFTVSNFKQVINLLNRTGHARFRRSPPQAQAQAQTQATQTQTSLQPQPETQQQGFSLDFVKPTILNSKPINKDETLTLSTTSSSFMSSVTNDASVSDGKIGPFLPPSAAKPPLSSAHRKKCRDAAAALSAKPSCHCSKKRKSRVKRTIRVPAISSKIADIPPDEYSWRKYGQKPIKGSPYPRYYSIPSSIFMLNRSKSNADLKVLSFRINYD

SEQ ID NO: 32749 - protein, 53 aa, Glycine max
  unsure (1)..(53): unsure at all Xaa locations
  Clone ID: TF_jC-gmXLIB3563P059cb11a1.pep
GQTMAKGNPCPRAYYRCTMAVGCSVSIPVLRCADDRTIXVTTYDGSHNHPLPP

SEQ ID NO: 32750 - protein, 132 aa, Glycine max
  Clone ID: TF_jC-gmst02400030c12d1.pep
ERSILREFVWNLEPDQPNRIGTDDGLWKPVQSSLTDSIEPVAAAPSRSNNQSISSSSSEDPPEKSTVSDDKPPEIPSKGKNKGQKRIRQPRFAFMTKSEVDHLEDGYRWRKYGQKAVKNSPFPRFTATFTSN

SEQ ID NO: 32751 - protein, 202 aa, Glycine max
  Clone ID: TF_GmC737383_1.pep
MSTTSHPIVHHSLFDEQDQIPTQMGFFSFPTNLTFPPLGCHQSSLKAFSSIAPSSLAISQQDSASNLTAETLFSTTAQKSREDLTSSFGGGQFLSLHRSSVNPWALGEVAECFSSKRSGFDDHHFRISAMKMKKIKARRKVREPRFCFKTMSDVDVLDDGYKWRKYGQKVVKNTQHPSYFRSSLDSCPLLVSPVRLSLIKEY

SEQ ID NO: 32752 - protein, 93 aa, Glycine max
  Clone ID: TF_uC-gmflLIB3260P015f01b1.pep
PPLNLGFPYKKFFYVACPCFLFFVFFYWPPFFFFFFFFFFFFFFFFFFFFFFFFFFTEKLTTSGLHCRGYYRCTQRNVQGCLATKQVQRRTRG

SEQ ID NO: 32753 - protein, 120 aa, Glycine max
  Clone ID: TF_GmC1080_1.pep
MEVKTRVQRCMDDQSVLVATYEGEHNHTHPSQMEVTTGSNRCMTLGSVPCSASLSSSPPTATLDWTKSKSSSESKNTSPKTESPEVPQVLVEQMATSLTKDPNFRAALVAAISGKMLHNN

SEQ ID NO: 32754 - protein, 77 aa, Glycine max
  unsure (1)..(77): unsure at all Xaa locations
  Clone ID: TF_LIB3242-205-Q1-J1-E11.pep
SFYRERWRXYIXXFFTFNPNPIIYYKYTNTCCPFRKHFDKSSHYPKSFITTYYWNHNHHVPTTKNIFHYISIPSFSN

SEQ ID NO: 32755 - protein, 153 aa, Glycine max
  unsure (1)..(153): unsure at all Xaa locations
  Clone ID: TF_LIB4280-035-Q1-K1-C10.pep
MMNQLAALQETQLNEYHNTTYQGISSSKQSIAKILAPVSSVGRGSSNSEAQKRKVVAEPKIFQEVTRKLYKTINADKRREVWTAQIRVNAEGCDDDGYSWRKYGQKEILGAKYPRIHXRVPCQREEEDGQGHMFRRRLKRVRMVNSSFLLIFL

SEQ ID NO: 32756 - protein, 172 aa, Glycine max
  Clone ID: TF_GmC1027_3.pep
MENTKMMGVKIQDYASNMESNNYPFFDFSEDKGSLGFMELLGAQDYSPLLDFPLSSHVSGPQTSSVKEPPETKKECSEVTNNNQQPATPNSSSISSASSEVFYDEQNKTVDQAPEHQKTKEQLKAKKTNQKRQREPRFAFMTKSEVDHLEDGYRWRKYGQKAVKNSPFPRSY

SEQ ID NO: 32757 - protein, 114 aa, Glycine max
  Clone ID: TF_GmC6804_1.pep
NYMNYGIIFFCYFFIFLHHINHLPLDLIFLSLFVIQKIIHAQCIVYKYNIYIYIYIYIYIYIYIYIYIYIYIYLEHAGMHTQVNFVLVLFLFSFDLTEEKTARENRNEEESRCK

SEQ ID NO: 32758 - protein, 56 aa, Glycine max
  unsure (1)..(56): unsure at all Xaa locations
  Clone ID: TF_LIB3093-052-Q1-K1-F6.pep
IMVNDICKKHANINNDDYSWRKYGKKTVKGYIXNRGYKKRRSMRGCTARKHGSGRV

SEQ ID NO: 32759 - protein, 151 aa, Glycine max
  unsure (1)..(151): unsure at all Xaa locations
  Clone ID: TF_GmC5708_1.pep
MEENFKCEQVGLIDELMQGKELAKQLCDHLLVSSSSSSSSHETNEVLIEKILSTYEKALAMLNCKADVGESKAKNGSMMDSHCPLTNGSPKSEVLEPEVKNKNVFKKXRAMSTCTEQVKVCLGTAHEGSLDDGYSWRKYGQKDILGAKFPR

SEQ ID NO: 32760 - protein, 122 aa, Glycine max
  Clone ID: TF_GmC5713_1.pep
MIIWVQRSLEDPTILVTTYEGEHNHGHQRAEISLVSNQSEALPPLKGSSPVSSPNTATIRSAVCPTVTLDLVKSGLVEFESAQKSSIQQFLVQQMATSLTRDPNFTTELATAISGKILEAQW

SEQ ID NO: 32761 - protein, 196 aa, Glycine max
  Clone ID: TF_LIB4164-057-R1-N1-D6.pep
HACRVILSSYEKALLILRCSNASTSELQGMNQATPTLLPESPLSVHGSPLREDVHGAIKDHHNSKKRKITPKWMDRVRVSCESGLEGPHEDGYNWRKYGQKDILGAKYPRSYYRCTFRSTQGCWATKQVQRSDEDPTMFDITYRGNHTCSQGNNAVLPPKSPEKHEKPAHSHNIDIHHAQASQESLAKFRSILSVN

SEQ ID NO: 32762 - protein, 130 aa, Glycine max
  Clone ID: TF_GmC1374_1.pep
CRSYYRCTSQKCGVKKRVERSFQDPTIVITTYEGQHNHHCPATLRGSAASMLSSPSFFGSSYMASSLPQDFLAQLVPSYSQINDHQSPMFHQNLSHNLHPQPQQQHQFQLSHDHGLLQDLLPSFPGKHEP

SEQ ID NO: 32763 - protein, 296 aa, Glycine max
  Clone ID: TF_GmC38338_1.pep
MSILFPRSSSAAKRKRVIRELVQGRDYATQLKFLLQKPIGPDGSVSAKELVANVLRSFAETLSNLVISGEDASQVESIDPRSEGSTESKKGSKDRRGSYKRRKTEQTWTIVAQTTDDNHAWRKYGQKEILNSQFPRSYFRCTRKFEQGCRATKQVQRIQENPDMYTITYIGFHTCKDTLKAPQMVTHSETWDSFLGPDANVPNEHYSIIGSQSQIVIQEYPNDETDPSDLTDANLWSDLKDFELSNDKPAGLKIAPENADSVYSCTGSRSLDMDFGIFSPHFCSTEDFHFDESQLL

SEQ ID NO: 32764 - protein, 192 aa, Glycine max
  Clone ID: TF_GmC143554_1.pep
YSWRKYGQKDILSAKYPRSYYRCTFRKTKGCFATKQVQRSEEDHTIFDITYRGSHTCKRNDAVLPPKSPDYTHAAPVTVKTDNITAPSASFGCMAQDNYHDLFPSLADSARAFFSTPSQTSSLSANTPESNYFVSPTFLEHEFDGVCNKPCPDSELARLVSADTSITSSPIFDFNFSLDAVGIDYPNFPFNI

SEQ ID NO: 32765 - protein, 150 aa, Glycine max
  unsure (1)..(150): unsure at all Xaa locations
  Clone ID: TF_GmC80686_2.pep
MDNNTCASSQLESEEASFEHKSETQTSKKRKMVEKTVVAVRTGENVGKLKNEGLPSDFWSWRKYGQKPIKGSPYPRGYYKCSTSKGCSAKKQVERCRTDASMLIITYTSTHNHPCPTAITTNSPQQPXELSESETTPDLSATTKEEDPRL

SEQ ID NO: 32766 - protein, 195 aa, Glycine max
  Clone ID: TF_GmC6804_2.pep
MENYSMLFPISNSSSYPISTSGVGSSQIGYNGQSSNAFLGLRPSNELLGSDDHDNGGEGGGDGDGNMLMSQISGGSNTNVSDELGGSGNSNNKKKGEKKVKKPRYAFQTRSQVDILDDGYRWRKYGQKAVKNNKFPRSYYRCTHQGCNVKKQVQRLTKDEGVVVTTYEGVHTHPIEKTTDNFEHILSQMKIYTPF

SEQ ID NO: 32767 - protein, 189 aa, Glycine max
  unsure (1)..(189): unsure at all Xaa locations
  Clone ID: TF_GmC89194_1.pep
MEDKAAIKELLEDEENPYDNTGNKQDAEKLPMLHTRQFLNMGESSSILDGNTKACAIAENAEKKMLGKNLACDDNKYNVEGEINSQITSHEAKSTEDQVSEVTCRRARVSIRARSDFSSMFDGCQWRKYGQKTAKGNPCPRAYYRCSMGTACPVRKQVQRCFKDETVLITTYEGNHNHXLPPAARPLAS

SEQ ID NO: 32768 - protein, 525 aa, Glycine max
  unsure (1)..(525): unsure at all Xaa locations
  Clone ID: TF_GmC1123_1.pep
MDKGWVSSQSLLPPTPDNTMFPLLGFPVKLSRPTMELHHDNRKLVAEVDFFSHTPPPNIVKKELDQTPLHINTGLQLLTANTRSDQSTVDDGLSSDAEDKRAKTTELAQLQVELQRMNAENKKLKEMLSHVTGNYTALQMHLVTLMQQNQQRTESTENGVAQGKVEDKNVGVGGGKVPRQFLDIGPSGTAEVDDQVSDSSSDERTRSSTPQDNNTEAGTRDGARNNNGNKXLGREESPDSESQGWGPNKLQKVNPSNPMDQSTAEATMRKARVSVRARSKHRGTXLIIISIYSSINNISNILLWLKLDINFVVLLIXVQRCADDRTILVTTYEGTHNHPLPPAAMAMASTTTAAASMLLSGSMSSADGIMNPNLLARAILPCSTSMATLSASAPFPTVTLDHHTQPITQLQFQKAWCPHSQVPFLQAQPKNFGSGAAPIAQAQALYNQSKFSAPQAPRPPLQPSQQPSLADTVSAAASAITADPNFTAVLAAAIXSSIIGSAHNSNNNNSNNNTSRTTISSFSGN

SEQ ID NO: 32769 - protein, 60 aa, Glycine max
  Clone ID: TF_5761350.pep
DNHVWRKYGQKGVLNSEFPRSYFRCGHKYDQGCLAKKQVQRDQENSNMYRTTYIGIHTCN

SEQ ID NO: 32770 - protein, 363 aa, Glycine max
  Clone ID: TF_GmC943_2.pep
MESDLSWEQNTLINELIQGMEVARKLKADLRMPYSVDSRDLLVQRILSSYEKALLILRCNASSTSELQAMSQATPTLLPESPLSVHGSPLREDVDGTIKDHQEVKHDSKKRKATPKWMDHVRVSCESGLEGPHEDSYNWRKYGQKDILGAKYPRSYYRCTFRNTQGCWATKQVQRSDEDPTVFDITYRGKHTCSQGNNAVLPPKSPEKQEKPTHSHNIDIHRAQASQESLTKFRNILSVNTDNLNNGDMAYPFTFPSTSFGCMKQDNHSLIPWALENESFLSDLYQTHLLSTTIPESNYFPSPTFQMNVFDGIYSKPHSESDINEIISTNTSATNSPIPDFNFSLDPVEIDPNFPFNTPGLFS

SEQ ID NO: 32771 - protein, 78 aa, Glycine max
  Clone ID: TF_GmC1687_1.pep
LDDGYKWRKYGQKVVKNTQHPRSYYRCTQDNCRVKKRVERLAEDPRMVITTYEGRHVHSPSNELEDSQTPFELSNFLW

SEQ ID NO: 32772 - protein, 297 aa, Glycine max
  unsure (1)..(297): unsure at all Xaa locations
  Clone ID: TF_GmC37350_1.pep
MEDKDRAASSDPTADAEFAGDTSWTLAADDSDGAYLFPGDRERSILREFVWNLEPDQPNRIGTDDGLWKPVQSSLTDSIEPVAAVPSRSNNQSISSSSSEDPPEKSTVSDDKPLEIPSKRKNKGQKRIRQPRFAFMTKXEVDHLEDGCRWRKYGQKAVKNSPFPRSYYRCTNSKCTVKKRVERSSEDPTIVITTYEGQHCHHTVGFPRGGIISHEAAFAGQLAPTMSQFYYPIQLPSRENDDYNNNTLSTISQPCQAQDETGEGSSVMMPADGSSPSQPSTDEGLLGDIVPPGMRIR

SEQ ID NO: 32773 - protein, 302 aa, Glycine max
  Clone ID: TF_GmC623_1.pep
MAVELMGFPQMDEQKAIEEAAAEGLKGMEHLLRLLSHQPSHLRTHHTDATVSNFKKLISLLNRRTGHARFRRAPLPSTSNSLAPSPPLANPVTFAPSQSQSLTLDFSKPNMFNTTNAKSMDLEFSKETFSVSSNSSFMSSAITGDGSVSNGKLGSSLFLTPPPVSAGKPPLSFAPIKKRCHDHREHSDDISGKLSGSSKCHCTKRRKNRVKKTVRVPVISSKIADIPPDEYSWRKYGQKPIKGSPYPRGYYKCSSVRGCPARKHVERAPDDPTMLIVTYEGEHRHSMQENISGGVGLGFEST

SEQ ID NO: 32774 - protein, 320 aa, Glycine max
  unsure (1)..(320): unsure at all Xaa locations
  Clone ID: TF_GmC42427_2.pep
MAVDLANIRMEENMAIQEAASAGLKSMEHLIRVLSSQIPSASSSSSNAHHHRLNLNHLDCAEITDFTVSKFKQVINLLNRTGHARFRRAPSHPSPSISPSQPQPQPQPQPQTLTLDFAKPVMVKSNPNPNPSSTDLSVSQYSKTKDTTTFSISPPMSTTTSSFLSSITADGSVSDGKIGPXILAGXKXPLXSSHRKKWYDATLSXGESSSSAHCHCSKRRKSRVKRMIRVPAISSKIADIPADEYSWRKYGQKPIKGSPYPRGYYKCSSVRGCPARKHVERAQDDPNMLIVTYEGEHRHPQPRLPETSAGAAADFVSQPV

SEQ ID NO: 32775 - protein, 140 aa, Glycine max
  Clone ID: TF_GmC652_3.pep
IQPLCIVLLQRPRIIVPPPSEVNLLDDGYRWRKYGQKVVKGNPYPRSYYKCTTQGCKVRKHVERASMDPKAVITTYEGKPNHDVPAAKTNSHTLANNSASQLKAQKFAIPDVKHSSSSRGVTGNEQRPVASLRLKEEQIT

SEQ ID NO: 32776 - protein, 100 aa, Glycine max
  Clone ID: TF_GmC581_2.pep
GLVEPRIVMQSFMDSEILGDGFRWRKYGQKVVKGNPYPRSYYRCTNIKCNVRKHVERAIDDPRSFVTTYEGKHNHEMPLKNTGTVASERDSQASLSKDKA

SEQ ID NO: 32777 - protein, 267 aa, Glycine max
  unsure (1)..(267): unsure at all Xaa locations
  Clone ID: TF_GmC193_1.pep
MDDRKVSEELVRGLEFANQLRQVMINGKDNESSATTTTPFVQSLVKNVFRSFTNTLFLLDKYPSYEVSHTTKSEDSQESCKGFTTRNKRGYXRNTQEWEEVSKTPKVDGHQWRKYGQKEILKAKYSRNYYRCTHKYDQNCQATKQVQRIQEDPPLYKTTYLSHHTCNDLLNYEIIPDSNNNSPSDTSILLSFNNTFPTPTKQECPFLSSFPSPTSVKKLEEVIPASSSRHNNNVTLPLPDPWDVMSNSAMCDSVGLDDVNLFLDFDD

SEQ ID NO: 32778 - protein, 167 aa, Glycine max
  unsure (1)..(167): unsure at all Xaa locations
  Clone ID: TF_uC-gmflLIB3275P057f01b1.pep
MTTKAEPNIQGSVNSTYQGTTANSMSKMDPESSQATADHLSGTSESEEVGDHETEVDEKNDEPDPKTRAVIILXKAEVSHTDPACSHRTVTEPRIIAHTTSEDDLLDDGYRRRKSGQTVVKGNPYTRSYYKRSAKGCKERKHVERAPTDSRAVITTYDGKHTDEALA

SEQ ID NO: 32779 - protein, 107 aa, Glycine max
  Clone ID: TF_GmC6090_3.pep
KYGQKVVKGTLHPRSYYKCTSAGCNVRKHVERASTDPKAVITTYEGKHNHDVPAARNSSPNTASSNSMPLKPHNVVPEKHPLLKDKDFGGNDQRPVHLRLKEEQIIV

SEQ ID NO: 32780 - protein, 90 aa, Glycine max
  Clone ID: TF_LIB3242-509-P1-J1-A7.pep
NTDCPFRKLFERASHDPSAFFTRYGRKHNHDVPTARNNCHYIATPACASQHTRNRPEKRDTISLNLGIGFSPPTNNTPNIQCRTTPSQPE

SEQ ID NO: 32781 - protein, 237 aa, Glycine max
  unsure (1)..(237): unsure at all Xaa locations
  Clone ID: TF_GmC1278_2.pep
MSMVKTETTSAMQSLTPENNNHRNGFQSDHKNYQPQQVQTLSRRSDDGYNWRKYGQKQVKGSENPRSYYKCTYPNCPTKKKVEKSLDGQITEIVYKGTHNHPKPQAAKRNSLSASSSLAIPHSNHGSNELPHHQMDSVATPENSSISMDDDDFDHTKSGGDEFDNDEPDAKRWRIEGENXGISAVGSRTVRXPRVVVQTTSDIDILDDGYRXWRKYGQKXVVRGNPNPRSYYKCTFP

SEQ ID NO: 32782 - protein, 107 aa, Glycine max
  Clone ID: TF_GmC1308_1.pep
ILFCFFRKNRVKKTVRVPAISSKVADIPPDEYSWRKYGQKPIKGSPYPRGYYKCSTVRGCPARKHVERASDDPTMLIVTYEGEHRHSIQTAMQENISGGVGLVFEST

SEQ ID NO: 32783 - protein, 173 aa, Glycine max
  Clone ID: TF_GmC5674_3.pep
NSARDGCEKTTEGLVNDGYRWRKYGQKLVKGNTNPRSYYRCSNPGCPVKKHVERASYDSKTVITTYEGQHDHEIPPGRTVTQNAATNTRTTATNGKAGTKSEGNTDDTGERSGLGLTSRLTEQQTGKSTTKSKAGDMVEFRVIRLSNEGPEIKLSEQQQQKDNSATKDDSVSN

SEQ ID NO: 32784 - protein, 445 aa, Glycine max
  unsure (1)..(445): unsure at all Xaa locations
  Clone ID: TF_GmC652_1.pep
MAGGGGGDRPPWKEAAPPRPTITLPPRSGSMESLFNGGFSPGPMTLLSGFLGDGDDGKSFSQLLAGAMSSPVAGAVAAGVMDSPGLFSSSQVSFGMTHQQALAQVSAQASQANSNMHIQAEHSLTQAPAAASNTTQQLMPPLTSDSWAAMTESIDHSHSEQRLQSSLLNVDKPADDGYNWRKYGQKQVKGSEFPRSYYKCTNPNCPVKKKVERSLEGHVTAIIYKGEHNHQCPHPNKCSKDTMTSNENSNMQGNVDSTYQGTSTNSMSKMDPESSQATADRLSGTSDSEEVADHETEVDEKNVEPEPKRRKAEVSXSDPASSHRTVTEPRIIVQTTSEVDLLDDGYRWRKYGQKVVKGNPYPRSYYKCTTQGCNVRKHVERTYEGKHNHDVPAAKTNSHTMASNTASQLKSHNTNPEKHNFGSRGMGGNEQQPVARLQLKEEQIT

SEQ ID NO: 32785 - protein, 148 aa, Glycine max
  Clone ID: TF_8282706.pep
QWRKYGQKIAKGNPCPRAYYRCTLAPACPVRKQVQRCADDMSILITTYEGTHNHPIPASATAMASTTSAAVSMLLSGSSTSQPTDHSFAYHANSPTLFSGVNFSLLDQPRANQVLLPTPSSHLLPTITLDLTSTPSYSLNQGNCLPSN

SEQ ID NO: 32786 - protein, 48 aa, Glycine max
  Clone ID: TF_GmC125700_1.pep
INLTALSLHSSRSYYRCSNPGCPVKKHVERASYDSETVITTYEGQHDH

SEQ ID NO: 32787 - protein, 290 aa, Glycine max
  Clone ID: TF_GmC1330_1.pep
MMALDMIDVVPRTRMEEENIAIQEAASAGLKSMEHLIRLLSPSSSLHNNLNNLNLNHLDCSEITGFTVSKFKQVINLLNRTGHARFRRSPPQAQAQAQTNPQPQPQIQQQGFSLDFVKPTILNSKPINKDETLTLSTTSSSFMSSVTNDASVSDGKIGPFLPPSAAKPPLSSAHRKKCRDAAAALSAKPSCHCSKKRKSRVKRTIRVPAISSKIADIPPDEYSWRKYGQKPIKGSPYPRGYYKCSTVRGCPARKHVERAQDDPKMLIVTYEGEHRHVLPLTSAAGVSFGH

SEQ ID NO: 32788 - protein, 507 aa, Glycine max
  Clone ID: TF_GmC5674_1.pep
MVSSDKSADQNIPSDKLQQRVSLDSDTTLSQGHDTKNDLSKPEEASILSIVVKNEEGKDSDAIACALESDQEGSTCSLPLEKPLQNPDTLSHELPRLQSSQEFPSIIREKVSKDGYNWRKYGQKHVKGNEFIRSYYKCTHPNCLAKKQLQQSNNGHITDSICIGQHNHPRPQLNSTVSVECVLPVVEQAPHKSSLATVEDKASVEHGCMPQQIQPLQSFPPAKVSPVNKLNASHLSLTKAKNQVHDNEEPESKRLKKDNTNPDVTRVDMSTRESRVVVQTSSEVDLVNDGYRWRKYGQKLVKGNTNPRSYYRCSNPGCPVKKHVERASHDSKVVITTYEGQHDHEIPPGRTVTQNAATNARTTASNGKAGTKSEGNITDDTGERSGLGSASRLTEQLNGESITKSKAGDMVEFCVISLSNEGPEIKLSEQQQQKDNSATKDDSVSNDVISHSSSGVLCRSNEQLKGEVKPISEGSKDCLNVVAVHDTRSTESEFNKQSTADAEPVQS

SEQ ID NO: 32789 - protein, 584 aa, Glycine max
  unsure (1)..(584): unsure at all Xaa locations
  Clone ID: TF_GmC666_1.pep
MDAGEALSDDPNRPNSAADAAPAPAGARYKLLSPAKLPISRSPCVTISPGLSPTSFLESPVLLSNMKVEPSPTTGSLSLLHQTAYGSMTSAASATFPVTTVCFNSTRNTXDDENSARGKPSFFEFKPHNRSNMVPADFDNHASEKSTQIDGQGKAQAFDSSPLVKNESASPSNELSLSSPVQMDCSGGSARVEGDLDELNPRSNITTGLQASQVDNRGSGLSVAADRVSDDGYNWRKYGQKHVKGSEFPRSYYKCTHPNCEVKKLFERSHDGQITEIIYKGTHDHPKPQPNRRYSAGTIMSVQEERSDKVSLTSRDGNGSYMCGQGSHLAEPDSQPELSPVATNDGDLDGLGVLSNRNNDEVDDDDPFSKRRKMDLGIADITPVVKPIREPRVVVQTLSEVDILDDGYRWRKYGQKVVRGNPNPRSYYKCTNTGCPVRKHVERASHDPKAVITTYEGKHNHDVPTARNSCHDMAGPASASGQTRIRPEESDTISLDLGMGISPAAENTPNSQGRMMLSEFGDSQTHTSNSNFNFVHTTTVPGYFGVLNNNSNPYGSRENPSDGPSLNHSAYPCPQNIGRILMGP

SEQ ID NO: 32790 - protein, 50 aa, Glycine max
  Clone ID: TF_uC-gmroLIB3258097f09a1.pep
ARIFLLYVRDRYQWRKYGKKVTRDNPSPRAYFKCSYAPSCPVNKFFCGSC

SEQ ID NO: 32791 - protein, 145 aa, Glycine max
  Clone ID: TF_GmC565008_1.pep
MMDQEVETLEAKLQRVKEDNRTLREMLETLSSKCEKLQSHLQEINNEEQEVSTKSDQSGSVLLARAEFPIAQKPSQIFVKTHPKDNSLMVKDGYQCKKYGQKKVTKDNPSPRAYYKCYLAPSCPVKKRVQRSLQDKSFLVATYEG

SEQ ID NO: 32792 - protein, 505 aa, Glycine max
  Clone ID: TF_GmC3118_2.pep
MDQRHGPQPLPESDTIGNDSHPKTQLTKETERVVESLSDAESRHRELRSSDKPCSDSNLETLGAGVTSSVETLAVQHRSDDLQGSSTAPNSGGKAESKETVESPEKETIERGAVQPLQTQTENRLQVSVCSIPLSDLSPTSVTQSLSIVSSPTVQKQKISTPKVNNTHVPEVDRKNPSGRKTLSAVSVARTSASDGYNWRKYGQKQVKSPTGSRSYYRCTHSDCCAKKIECCDDSGHVIEIVYKSEHSHDPPRKTNSIRENKFLSSSEPIVENSVPEQPIKVLKDADPSISSKESLQEAPCSTDKKRQNTSNISGNGKVILKEEHVNEPVPKKRMKKGDLTDMDSPVKPGKKSKFVVHAAGDVGISADGYRWRKYGQKMVKGNPHPRNYYRCTSAGCPVRKHIETAVDNSDAVIITYKGVHDHDMPVPKKRHGPPSAPLVAAAAPASMNSLQVKKPDSPQNKKISTQWSVDTEGELTGEALELGGEKAMESARTLLSIGFEIKPC

SEQ ID NO: 32793 - protein, 98 aa, Glycine max
  Clone ID: TF_GmC362_3.pep
GVKSTVRVPAISSKVADIPPDEYSWRKYGQKPIKGSPYPRGYYKCSTIRGCPARKHVERAPDDPAMLIVTYEGEHRHAVQAAMQENPAGVVGLVFEST

SEQ ID NO: 32794 - protein, 238 aa, Glycine max
  Clone ID: TF_GmC6782_1.pep
MEGGERGVNPNNYELQVSFANTPQAIHEMGFVQFEENQVLSFLAPSAQSQSSQLSQSLNACNGGSNTAVAAATTTATATTSGSGATIGFSHNDLVSRTCWYNNEQVRTLDPKAVNDENCTGNTSDGGNNSWWRSAGSEKNTMKVRRKLREPRFCFGIRLEVDVLDDGYKWRKYGQKVVKNSLHPRSYYRCTHNNCRVKKRVERLSEDCRMVITTYEGRHNHSPCDDSNSSEHECFTSF

SEQ ID NO: 32795 - protein, 321 aa, Glycine max
  Clone ID: TF_GmC244_1.pep
MAVEFMMGYRNDTFAEDNAVREAASGLESVEKLIKLLSHTQQQYQTTSKSSMENIDTDYTAVADVAVSKFKKVISLLGRTRTGHARFRRAPVPVPVPVASPPPSEPRVYRATPLQQIPPPTLHTHSVTDHSLIPKIERKDSSKTINFSYSNSFVSSLTAGDTDTKQPCSSSPSPATAFQITNLSQVSSAGKPPLSSSSLKRKCSSENLGSAKCGSSSSRCHCSKKSRKMRQKRVVRVPAISLKMADIPPDDYSWRKYGQKPIKGSPHPRGYYKCSSVRGCPARKHVERALDDPSMLVVTYEGEHNHTLSAAEATNLILESS

SEQ ID NO: 32796 - protein, 531 aa, Glycine max
  unsure (1)..(531): unsure at all Xaa locations
  Clone ID: TF_GmC1123_2.pep
MDKGWGLTLDTSSSQSLPLFPSNDNKMFPLLGFPVNLSRASKEDDENRKVVGEVDFFSDRNKPTPPPSHDHNVKPNIVKKEIDETPLHINTGLQLLTANTGSDQSTVDDGVSSDAENKRAKTTELAQLQXELQRMNSENKKLKEMLSHVTGNYTALQMHLVTLMQQNQQRTESTENEVARGKRMVPPRQFLDLVPSGTTEIDDQVSNSSLGERTRSTTPPSCNKNDDKDKKETTDRPHSGKLLNHTTDPSTSPEAAMRKARVSVRARSEAPMISDGCQWRKYGQKMAKGNPCPRAYYRCTMAVGCPVRKQVQRCADDRTILVTTYEGTHNHPLPPAAVWMVMASTTAAAATMLLSGSMSSADGVMNPNLLARAILPCSTSMATLSASAPFPTVTLDLTHNPKPXNFKGPGAPFQVPFLQAQPQNFGSGATPIAQALYNQSKFSGLQLSQDVGSSQLAPQAPRPPLQPSQHPSLADTVSAAASAITSDPNFTAVLAAAISSIIGGAHNSNNNNNNNSNNNTSRTTISSFSGN

SEQ ID NO: 32797 - protein, 312 aa, Glycine max
  Clone ID: TF_GmC1123_3.pep
GKVPRQFLDIGPSGTAEVDDQVSDSSSDERTRSSTPQDNNTEAGTRDGARNNNGNKSELGREESPDSESQGWGPNKLQKVNPSNPMDQSTAEATMRKARVSVRARSEAPMISDGCQWRKYGQKMAKGNPCPRAYYRCTMAVGCPVRKQVQRCADDRTILVTTYEGTHNHPLPPAAVWMVMASTTAAAATMLLSGSMSSADGVMNPNLLARAILPCSTSMATLSASAPFPTVTLDLTHNPNPLQFQRPGAPFQVPFLQAQPQNFGSGATPIAQALYNQSKFSGLQLSQECRIFSISTTSSQTTLAAKPTSLTG

SEQ ID NO: 32798 - protein, 201 aa, Glycine max
  unsure (1)..(201): unsure at all Xaa locations
  Clone ID: TF_LIB4391-036-R1-K1-E2.pep
LQKVNPSNPMDQSTAEAXMRKARVSVRARSEAPMISDGCQWRKYGQKMAKGNPCPRAYYRCTMAVGCPVRKQVQRCADDRTILVTTYEGTHNHPLPPAAMAMASTTAAAATMLLSGSMSSADGVMNPNLLARAILPCSTSMATLSASAPFPTVTLDLTHNPXPLQFQRPGAPFQVPFLQAQPQNFGSGATPFAQHFIINQN

SEQ ID NO: 32799 - protein, 300 aa, Glycine max
  Clone ID: TF_GmC94_1.pep
MENLGGSSRRKAIEELLRGRDSAQQLKSVINGTYDDGSATPFAQQLVKEVLMSFTNSLLFLHNNPTSESHHVFNVQVWDSPKSEDSQESNCKSSTIKEPRGCYKRRRTEQTWEKESEAPIDDGHHWRKYGQKEILNAKFPRNYYRCTHKFDQGCQATKQVQRVQEEPILFKTTYYGHHTCKNSANPDIILDPMSPSSSSKFLSFDNSFSTPSKQECPFLSSSNNFPSSSSVKRECKEEVPPSISSNDYLISSDLTFDSSPRHHVTLSSTLDSEYKSVDISDVLYDSAQLDFVFEPFLEIR

SEQ ID NO: 32800 - protein, 197 aa, Glycine max
  Clone ID: TF_GmC25797_1.pep
MDYYFGNLNPNPYYHHSAVVNMASPSSEFMLSDYLVLEDALVVDHHQESWSQSTETESSEKATSSDASHGFGDATSTNTNMHIKCQNSGIKGKNAEVSQRITFRTRSQLEVMDDGYKWRKYGKKTVKSSPNPRNYYKCSGEGCDVKKRVERDRDDSNYVLTTYDGVHNHQTPSTAYYSQMPLLHSNHDWALHPSANS

SEQ ID NO: 32801 - protein, 253 aa, Glycine max
  Clone ID: TF_GmC80686_1.pep
MDNNTSACAYPQLESEEASSEHKSETQTSKKRKMVEKTVVAVRVGEKVGKLKNEGLPSDFWSWRKYGQKPIKGSPYPRGYYKCSTSKGCSAKKQVERCRTDASMLIITYTSTHNHPCPTPITTKSTTTKEEDQEHIELEEEEEQRDNNNNKPSDEVTNEENFHYLQSPIRCSSQDIIIEQEDPFKLNTEKSHDRMDLLLEEEPLCFAQLKNLSASKNEELDFFDELEELPMSSSLLHFTRNIFSDERIPVGPS

SEQ ID NO: 32802 - protein, 320 aa, Glycine max
  Clone ID: TF_GmC1027_1.pep
MEKKEMAVKTEDAIGSSSFPCYNSNLYPFSNAFDFSEVDKSSLGFMELLGVQDYSPLPELPQLSTVSVQPHHSTVKVPSDNGKECSEVLNHQPATPNSSSISSASSDAVNDEQNKTLLDQAEEDDDEEEGQQKTKKQLKPKKTNQKRQREPRFAFMTKSEVDHLEDGYRWRKYGQKAVKNSPFPRSYYRCTSVSCNVKKRVERSFTDPSVVVTTYEGQHTHPSPVMPRSGVSAGYANNFGSVLPPGNYLSQYQHYHHQQQQQHLVNTLSSLGFPYNDSSSPKNAVFTQERRLCSNHGTNAFLRDHGLLQDVVPSHMLKEE

SEQ ID NO: 32803 - protein, 192 aa, Glycine max
  unsure (1)..(192): unsure at all Xaa locations
  Clone ID: TF_GmC98460_1.pep
LLAVQDYNVPLFDWLPAGVGHHPSPSPASSNVPDSSEVLNTPASPNFSSISSSSNEATVNNNSEQQSGKELQEEEGGNGGRGDNQDQDKTKKQLKAKKKKKKNQKKQREPRFAFMTKSEVDHLDDGYKWRKYGQKAVKNSPYPRSYYRCTSAGCGVKKRVERSSEDPSMVVTTYEGQHTHSCPAXARSSLGF

SEQ ID NO: 32804 - protein, 407 aa, Glycine max
  Clone ID: TF_GmC595_1.pep
MWKFNEPTKQTDFSPERTATKSEFPSIQSFSSEMAEGKPEIQSSSVPGSGYFDYTSASQSVREQKRTEDGFNWRKYGQKQVKGSENPRSYYKCTHPNCSVKKKAENFSTGHITEIVYKGQHSHPKPQSTRRTNSQSIHQPSSSCTNSGITDHSVVTLGNPQMDHFSIQEDSSASVGEEEFEQTPQTSYSGGDGDNLGPDAKRWKGDNENDGYSVSASRSVREPRVVVETTSEIDILDDGFRWRKYGQKVVKGNSNARSYYKCTAPGCSVRKHVERAAHDIKAVITTYEGKHNHDVPAARGSGKYNSNRNSQNSNISAPIRPSAVNCYSNSSSFTNSLYNNTRLPATGNQESFSLDKFKNPGSFGYSDLNRPMGSHTNHAQYTDAAYSRAKDERKDDSFLQSFLSKDF

SEQ ID NO: 32805 - protein, 351 aa, Glycine max
  Clone ID: TF_GmC608_1.pep
MAEDWDLHAVVRGCSTVTSSSVSSSSSPSSSGFASSYFHPEAAVSSSSSSYSGFNIFKGEQGISQVLSLSAYPFEARSSIEELHELCKPFFSKSQPLTLQASSPLSSLSSYSSAPPKSVSTQEKQQQRSKQAHAVTTPRSKRRKNQLKKVCQVPVENLSSDIWAWRKYGQKPIKGSPYPRGYYRCSSSKGCLARKQVERNRSDPTMFIVTYTAEHNHPAPTHRNSLAGSTRQKPLVPQTATTTEEDSDKSKSLTKPTSPATSGAEEEAPTPSQGEKSESREEKEDVMDDEEEDEFGLSDMVLSDDFFESLDELSQLTAPSVVTGDCFSDPFSAIAIPSWVASGAATASGCR

SEQ ID NO: 32806 - protein, 355 aa, Glycine max
  Clone ID: TF_GmC86629_1.pep
MEEVEQANRVAVESCHRVLSLLSQPRDQVQHRNLMVETGEAVVRFKKVVSLLHSGMGHARVRKVKNPQIPFSHQSIFLDNPNCKTINNHHFKNLQFPQTSFPDNSIQELGSTIKNSLSLGQPSLELSSNGKSPLHLTQQASSNHYHFFQQQQQQQQQRLLLQQQQQQQQQMKHQAEMMFRRNNSGINLNFDSTSCTPTMSSTRSFISSLSIDGSVANLDGSAFHLIGAPHSSDQNSQQHKRKCSARGDEGSLKCGSSARCHCSKKRKHRVKRAIKVPAISNKLADIPPDDYSWRKYGQKPIKGSPHPRGYYKCSSMRGCPARKHVERCLEEPTMLIVTYEGEHNHPKLPTQSANA

SEQ ID NO: 32807 - protein, 113 aa, Glycine max
  Clone ID: TF_15203247.pep
EFRTRQKPIKGSPYPRNYYRCSSSKGCMARKQVERSNTEPDMFVVTYTGDHSHPRPTHRNSLAGSTRSKTLVTNPPPSPGSLSCFQATPFSSSSSSPPHSPTSPEEDPRKPPI

SEQ ID NO: 32808 - protein, 404 aa, Glycine max
  Clone ID: TF_GmC121755_1.pep
LERMKVENHRLKNMLDQVNNNYNALQTHLVSLMKDQMDKEDDKQQPHQVFDGKLEEKQAGNGGGALVPRQFMDLGLATNADTNETSHSHSSSVIRSQDSPPTNNTEVASKKNGGASDEGLVFDQDKKEFGRGIEREDSPSDQGVAANNNVPKFSPPRNVDQAEATMRKARVSVRARSEAPMITDGCQWRKYGQKMAKGNPCPRAYYRCTMAAGCPVSKQVQRCAEDRTILITTYEGNHNHPLPPAAMAMAQTTSSAARMLLSGSMSSADGLMNASFLTRTLLPCSSSMATISASAPFPTVTLDLTQSPNPLQFPKQPSQFQIPFPGVPQNFANSQASLLPQIFGQALYNQSKFSGLQMSQDSDPSQLSNQSQRPPPHLADTVSAAIAADPNFTAALAAAITSII

SEQ ID NO: 32809 - protein, 163 aa, Glycine max
  unsure (1)..(163): unsure at all Xaa locations
  Clone ID: TF_uC-gmflLIB3260P022b08b1.pep
MPYDGKLHGIPKVCKIHGCITLREPYRVIETCPDIDILDDGYWRKXVGQKVTKGNPNPRSYYVCTHPRCAGNKHVERASHDLRAVITPYEGAHTHNVPAPRFSDGHFVNRALLNNVSDHTNSAYTLVLVLPVIHQCDNSLHIQRSQAAPKGPCRLTLDMLESP

SEQ ID NO: 32810 - protein, 64 aa, Glycine max
  unsure (1)..(64): unsure at all Xaa locations
  Clone ID: TF_9204323.pep
MVDEPEPKKRMNKGDLTEMDSPVXPGKKPKFVVHAAGDVGISGDGYRWRKYGQKVVKGNPHTRE

SEQ ID NO: 32811 - protein, 184 aa, Glycine max
  Clone ID: TF_GmC1119_1.pep
MDFYFGNSPPYPNNYAHNSLNMALSSPEIALSDYLMLDDYVDHQDSRSSQSTESSEKATFNDATHGFSTGATSKNNNINCKNGINENKGGVGPRIAFRTKSELEIMDDGYKWRKYGKKSVKSSPNLRNYYKCSSGGCSVKKRVERDRDDYSYVITTYEGVHNHESPFTTYYSPISFVHSDTTFK

SEQ ID NO: 32812 - protein, 146 aa, Glycine max
  Clone ID: TF_GmC421_2.pep
FRRIIALLDGLVSCCAKLVTCRSYYKCTHPGCPVRKHVERASHDLRAVITTYEGKHNHDVPAARGSGSHSVNRPMPNNASNPTNTAATAISPLQVIQHSDNSHQNQRSQAPPEGQSPFTLEMLQSPGSFGFSGFGNPMQSYMNQQQ

SEQ ID NO: 32813 - protein, 128 aa, Glycine max
  Clone ID: TF_GmC120733_1.pep
KLVKGNPHFRNYYRCTSSGCPVRKHIETAVDNSKALIITYKGMHDHDMPVPKKRHGPPSASLVAAAAPASTNNVQLKKTGLLQNQETEAQCLEDTEGELTGEALDLGGEKAIESARTLLSIGFEIKPC

SEQ ID NO: 32814 - protein, 523 aa, Glycine max
  Clone ID: TF_GmC6090_1.pep
MSTPNTDSGTAPPPRPTITLPPRPSAEAFFSAAAGASPGPMTLVSSFFGSDAAADCRSFSQLLAGAMASPMAFSAAAAAADNSGKDDDGPHKGFKQSRPMNLVIARSPVFTVPPGLSPSGFLNSPGFFSPQSPFGMSHQQALAQVTAQAVLAQSHMHMQADYQMPAVTAPTEPPVRQLSFALNEASEQQVVSCVSSVSEPRNAQLEAPELSQADKKYQPSSQAIDKPADDGYNWRKYGQKQVKGSEYPRSYYKCTHLNCVVKKKVERAPDGHITEIIYKGQHNHEKPQANRRAKDNSDSNGNVTVQPKSESNSQGWVGQLNKFSEKIPDSSVAKSDQTSNQGAPPRQLLPGSSESEEVGDVDNREEADDGEPNPKRRNTDVGVSEVPLSQKTVTEPKIIVQTRSEVDLLDDGYRWRKYGQKVVKGNPHPRSYYKCTSAGCNVRKHVERASMDPKAVITTYEGKHNHDVPAARNSSHNTASSNSMPLKPHNVVPEKHPLLKDMDFGSTDQRPVHLRLKEEQIIV

SEQ ID NO: 32815 - protein, 561 aa, Glycine max
  unsure (1)..(561): unsure at all Xaa locations
  Clone ID: TF_GmC1824_1.pep
MINPTTLPQQSLPGIEVSAQSENSFQSQSVDAVKAQTENKSGFRLQADFAESPPQKDNGIKMFSADQRAFDVVGGGNEHSTPIEEQADEGDQRGNGDSMASGVGGAPSEDGYNWRKYGQKQVKGSEYPRSYYKCTHPNCQVKKKVERSHEGHITEIIYKGTHNHAKPPPNRRSXIGSVNLHTDMQVDHPEHVEPHNGGDGDLGWANVQKGNIAGAANWKHENIEATSSASVGPEYCNQSPNLQAQNGTHLDSGEAVDASSTFSNEEDDQVTHGSVSLGYDGEGDESESKRRKLESYAELSGATRAIREPRVVVQTTSEVDILDDGYRWRKYGQKVVKGNPNPRSYYKCTNAGCTVRKHVERASHDLKSVITTYEGKHNHDVPAARASSHVNANASNAVPGQASLQTHVHRPEPSQVHNGIGRLERPSLGSFNLPGRQQLGPSHGFSFGMNQSMLSNLVMSGLGHAQAKLPVMPVHPFLAAQQQHQQRQQHQQQQQHQQQQQQHQQQQQHQQQQCAANDLGFMLPKGEPNVEAIPEHGGLNLSNGSSVYQEMMSRMPLGPHM

SEQ ID NO: 32816 - protein, 324 aa, Glycine max
  Clone ID: TF_GmC42427_1.pep
MTVDLVGAAKMGMEENIAIQEAASAGLKSMEHLIRVLSSQIPSSASSSSNAHHHRLNLNHLDCTEITDFTVSKFKQVINLLNRTGHARFRSAPSHPSPSTSLPSQPQPQPQPQPYALTLDFAKPVMLKSNPNPNPSSTDLSVSQYSKTKDTTTFSISPPVSTTTSSFMSSITADGSVSDGKIGPAIIAAGKPPLSSSHRKRCHDATLSAGKASSSAHCHCSKRRKSRVKRMIRVPAISSKIADIPVDEYSWRKYGQKPIKGSPYPRGYYKCSSVRGCPARKHVERAQDDPNMLIVTYEGEHRHPQPRLPETAAGAGGTFAAHPV

SEQ ID NO: 32817 - protein, 302 aa, Glycine max
  Clone ID: TF_GmC42742_1.pep
MANSVAFSDEIPNMSMSFPFSPAFSSSIFDMMPPPPPSSSHDPKAPNFANSFMDLLAVPADYYTPSLFDWSQNTAPTSAPPPSTTQINHPLPSPASSNVPDGSEVLNTPASPNSSSISSSSNEAAAATTANKTTGNDNEEEEDETAIDATAGREEEDHQDQDKTKKQLKPKKKNQKKQREPRFAFMTKSEVDHLDDGYRWRKYGQKAVKNSPHPRSYYRCTTATCGVKKRVERSSEDPTVVVTTYEGQHTHPCPATSRASFGFMHSEASGFGPTSGLGSAHFMLQQQQQFRDQAQAQAAMLY

SEQ ID NO: 32818 - protein, 88 aa, Glycine max
  unsure (1)..(88): unsure at all Xaa locations
  Clone ID: TF_GmC182872_1.pep
YDVNLKIKKYIFGVCDGYTRRRYGEDDVIRGXHRRSYYRCTHNNCRVKKRVERLSEDCRMVITTYEGRHNHSPCDDSNSSENECFTSF

SEQ ID NO: 32819 - protein, 230 aa, Glycine max
  Clone ID: TF_GmC373_2.pep
MDHMGDPKSIIHELLQGLELARQLQVYLHMPTSSQETRDLLIQKIISTFEKALEMVNCKGPVPAGESSHHPLGAALIRVSDSPLSSSPRSEDSDRDFKDQDPNAFKKRNTLPRWTKHIRVTPGMGVEGPLDDGYSWRKYGQKDILGALYPRGYYRCTHRNVQGCMATKQVQRSDEDPTIFEITYRGKHTCTVANNVGSSSPIPLENQEPSLNNTISQHQHQQNILQSHEQ

SEQ ID NO: 32820 - protein, 301 aa, Glycine max
  Clone ID: TF_GmC43050_1.pep
MLNEISEHYAALQNQLLLAMQQKKLSSSPRNNEDMQKDSQQNNMEKPALPSCRQFLNTGKINNRVILQEAKIVEEQAFEASCKKARVSVRARSESSLMGDGCQWRKYGQKISKGNPCPRAYYRCNMGTACPVRKQVQRCAEDESVVITTYEGNHNHSLPPAARSMACTTSAALKMFLSGSTTSSHGSTYSYSNSDLFSPLCTSTYYPSAAPSCPTITLDLTQTSKNNMKFPSAISSNHLQPFPLSLHGQPQQSEGILPSEKNLALVDVVSAAITNDPSLKAALEAAVSSIIGDSQKSLPTL

SEQ ID NO: 32821 - protein, 144 aa, Glycine max
  Clone ID: TF_LIB3167-037-P1-K1-E7.pep
NPQHYFELLFYRNYYRCSSCKGCVARKQVERSTTEPNTFIVTYTGDHKHAKPVHRNSLAGSTRTKPSTTRLSEPNESVSCPKKENACSSNSELSPMLSVSDTLENEETVSASEPDCPDMEIEPSDNDDVLIPNTGAMFDAVLLG

SEQ ID NO: 32822 - protein, 263 aa, Glycine max
  Clone ID: TF_GmC855_2.pep
MHHRRFSKLIHVADPDEPESGPEPASEAGPASPSSGEDTKTEAPSPKKRREMKKRVVTIPIGDVDGSKSKGENYPPSDSWAWRKYGQKPIKGSPYPRGYYRCSSSKGCPARKQVERSRVDPTKLIVTYAYEHNHSLPFPKSNSSAASAAVSDGAAVSPIESAARFPPEEEMTVFATDSDLELAGDAAVLLSHHHHHFGWFDDVASTGVLESPICGEVDDVAVPMREEDESLFADLGELPECSAVFRRRNIPATSAIRCGGITG

SEQ ID NO: 32823 - protein, 103 aa, Glycine max
  Clone ID: TF_LIB4281-007-R1-K1-B11.pep
MMKTENSSSMQSFSPEIASVQTNHSNGFQSDYGNYPPQSQTLSRRSDDGYNWRKYGQKQVKGSENPRSYYKCTYPNCPTKKKVERTLDGQITEIVYKGTHNPS

SEQ ID NO: 32824 - protein, 336 aa, Glycine max
  Clone ID: TF_GmC397_2.pep
MLLSLHKLNLNLSSCSSSGIYLAVMDYSSWINTSLDLNINLHRVHEELPKKQVENNFFSLDLEVKKSSVKQESAGALAEELKRVSAENKKLTEMLTEMCENYNTLRSNLMEYMRKNPDKELSSSRKRKSASSNNNSTIPMGVNGTSESSSTDEESCKNPKEDMKTKISRVYMRTEASDTSLIVKDGYQWRKYGQKVTRDNPCPRAYFKCSFAPSCPVKKKVQRSVDDQSVLVATYEGEHNHPQFSSQMEATSGSGRSVTLGSVPCTASLSTSTPTLVTLDLTKSQGSNDSKSTKPKGDSPKVPQVLVEQMATSLTTDPNFRAALVAAISGRLLHNN

SEQ ID NO: 32825 - protein, 72 aa, Glycine max
  Clone ID: TF_LIB4392-029-R1-N1-B6.pep
ARIFLLYVRDRYQWRKYGKKVTRDNPSPRAYFKCSYAPSCPVNKVSHTCFLLFPIELALQLISKVQIMLKHY

SEQ ID NO: 32826 - protein, 192 aa, Glycine max
  Clone ID: TF_GmC142606_1.pep
MESKDPPNPPPQNNPFIFTPNSMLQNPNWDPQEQSGLCDIDWGNLFSAQNGLLLNGDAKDEIECASSFSFVAQNKGVCEEEKGNKEKRKGGRMKKTTRVPRFAFQTRSADDILDDGYRWRKYGQKAVKNNTYPRSYYRCTHHTCNVKKQVQRLSKDTSIVVTTYEGIHNHPCEKLMETLTPLLKQIQFLASL

SEQ ID NO: 32827 - protein, 538 aa, Glycine max
  unsure (1)..(538): unsure at all Xaa locations
  Clone ID: TF_GmC1278_1.pep
MTTSFSDLLSSPTTHHNLGVFERPHHKSSSSDQTGSSGGVPKFKSTPPPSLPLSHHLPPIFSPSSYFNXIIPHGLSLAELLDSPVLLNSSNVLPSPTTGSFAGQGFNWKSSYGESQQHVKEEDKSFSSFSFQTQTHPPLPSSNGFQSSTGVVQTGWSFPEIAKQDGFASRMSMSMVKTETTSAMQSFNSENNNHRNGFQSDHKNYQPQQVQTLSRRSDDGYNWRKYGQKQVKGSENPRSYYKCTYPIKWIQXALDGQITEIVYKGTHNHPKPQAAKRNSLSASSLAIPHSNHGGINELPHQMDSVATPENSSISMEDDDFDHTKSGGDEFDNDEPDAKRWRIEGENEGMPAIESRTVREPRVVFQTTSDIDILDDGYRWRKYGQKVVKGNPNPRSYYKCTFPGCPVRNHVERASQDLRAVITTYEGKHNHDVPAARGSGNNSMNRSLPITNTTNNTSAATSLYTNNNSLQSLRPPAAPERTSSHFNPNMQQSSSGSFGFSGFGNPLMGSYTNQQSDNVFITRAKKEPGDDSFLDSFLC

SEQ ID NO: 32828 - protein, 93 aa, Glycine max
  Clone ID: TF_GmC351_3.pep
MRLKRVVRVPAISLKMADIPPDDYSWRKYGQKPIKGSPHPRGYYKCSSVRGCPARKHVERALDDPAMLVVTYEGEHNHTVSAADATNLILESS

SEQ ID NO: 32829 - protein, 154 aa, Glycine max
  Clone ID: TF_jC-gmro02910003h07a1.pep
ELGIRLELQSCLIFHLRGLLLSLYTRQSRTCPQKWLPVKPDLQCEPGPGSWYSDYTSASVSVPDQKIAEHGFNCRNYGQNLVKGSENPHRYYKCTHANCSVNKTVEKTLEGQMTEVVYKGHHNHPKLQSTRRTNSQSMNKPSSSCTNSWISDQS

SEQ ID NO: 32830 - protein, 167 aa, Glycine max
  unsure (1)..(167): unsure at all Xaa locations
  Clone ID: TF_jC-gmst024160g10a1.pep
GSRASVFSCTTACFDTNTVDDRKSSFFEFKPLSRSNMVPADFNNHVSKQSTQVEGPGKTQSFASSPLVESEIAVPSNELSLSSPVQKVSSSASAPVDVDLDDINHIGNTATGLQASHVEVRGXSGLSVAAEKTSDDGYNWRKYGQKLAKEVDFXQLYKCTHPTVSEK

SEQ ID NO: 32831 - protein, 471 aa, Glycine max
  Clone ID: TF_GmC581_1.pep
MHIKEAERVVIAKPVASRPTCSTFKSFSELLAGAINASPAIPSSQTTVSAIRPKTVRFKPAMNQPPSGFVFSQADTFGAALDNSSEMSPKLDTKQSLIYKPTAKLVSKTTVSLLANMGNCSTSRQQTQQPMEANFQHSIHEKFRTQPSSNLDQSITPQTEINYQSSEPSKMVQQNIEEDQKVLTSSVNCDRPSYDGYNWRKYGQKQVKGSEYPRSYYKCTHPNCPVKKKVERSFDGNIAEIVYKGEHNHSKPQLHKRNSAAGTQGSGVMSDGMVQDMWSNSHSERNEGNEVRIENTGLSMHSDYYVKVPQPNDSSLNIGATNAGGGSMENSCGLSGEYEEGSKGFEAQEDEHRSKRRKNENQSNEAALSEEGLVEPRIVMQSFTDSEVLGDGFRWRKYGQKVVKGNPYPRSYFRCTNIMCNVRKHVERAIDDPRSFVTTYEGKHNHEMPLKNTGTVASERDSQASLSKDKP

SEQ ID NO: 32832 - protein, 568 aa, Glycine max
  unsure (1)..(568): unsure at all Xaa locations
  Clone ID: TF_GmC4714_1.pep
MDGTTNSGEPRSSSVLQNTGASEDPNRSGSGQNSMARYKLMSPAKLPISRSPCITIPPGLSPTSFLESPVLLSNMKVEASPTTGSLRKLQQTVHGSMASAASATFPVTTACFDTNTVDARKSSFFEFKPLSRSNKVPAETHTSISNFKFVHKSSAPVXFGASNNSFESEISVPSRDEGPSLNLSSYPCSQSMGRILMGXKLITPQHRNRELSVTFCFLFSYFWRXYSFKGVTSHFLKVGSSSSEVKKLFERSHDGQITEIVYKGTHDHPKPQSSCRYSTGTVMYIQGERSDKASLAGRDDKASTMYGQVSHAAEPNSTPESSPVATNDDGLEGAGFVSNRNNEEVDDDDPFSKRRKMELGNVDITPVVKPIREPRVVVQTLSEVDILDDGYRWRKYGQKVVRGNPNPRSYYKCTNAGXPVRKHVERASHDPKAVITTYEGKHNHDVPAARNSSHDMAVPAATAGGQTRIKLEESDTISLDLGMGISSAAEHRSNGQGKMLHSELGETQTHASNSNFKFVHTTSAPVYFGVLNNSSNPYGSRDNRSDGPSLNHSSYPCPQSMGRILLGP

SEQ ID NO: 32833 - protein, 245 aa, Glycine max
  Clone ID: TF_GmC373_1.pep
MGVEGPLDDGYSWRKYGQKDILGALYPRGYYRCTHRNVQGCMATKQVQRSDEDPTIFEITYRGKHTCTVANNVGSSSPIPLENQEPSLNNTNIPQHQHQQNILQSHEQQQNELLLSLRKGLRVQTENLDSPEQPLVPFRFPLSTNIKNESHVFPSPVLENFTSPSYVSPAASGIGHFSVSPSGVVNSFEGNPNLANSESQINDMIPATTTTSAAPNSSTVGLEFPFDQFEFDGQNFTFDNPRFFS

SEQ ID NO: 32834 - protein, 86 aa, Glycine max
  unsure (1)..(86): unsure at all Xaa locations
  Clone ID: TF_LIB3050-015-Q1-E1-F6.pep
SDTTTERGQKPLNGSPYSRGYYTCNSVKRSPTRTHMDRTPDDPAMSTVTYEXEHRHSIPENISGRVCLRFNHSQGSCKLNLTLVHQ

SEQ ID NO: 32835 - protein, 120 aa, Glycine max
  Clone ID: TF_700874291_FLI.pep
VQRSVEDPSVLVTTYEGEHNHGQQHQTAEISINSSSKSETPRPAVSPSAMNIRSSAAAGPIVTLDLVKSKVVDINAQKSSLQQFLVHQMATSLTRDPNFTAALASAISGRILDDTSVGKR

SEQ ID NO: 32836 - protein, 178 aa, Glycine max
  unsure (1)..(178): unsure at all Xaa locations
  Clone ID: TF_GmC26844_1.pep
MEESTKRKHTNLIHELIQGKELTKQLSDHLVSSSPTSHETNELLVEKILLSYEKALTMLNWGSIMGEAKTTSGNIMDSHCSFTNGESPRSEVVDREFEHKAVFKKRKTMPRWTEXIVKICSRTGLEGSLDDGYSWRKYGQKDILGATFPRRYYRCTQRNVQRCLASXQAQRSDEDTTT

SEQ ID NO: 32837 - protein, 138 aa, Glycine max
  Clone ID: TF_uC-gmroLIB3259P236f07a1.pep
SRSRTETLKHVCENYVALQKHLNEFSQLRNANFDKEAGTVPSLKRKAESVNLFGINNYTECSTITEEETFKRPKHSTEPKVSKVLTRTDASDTGLYVRDGYQWRKYGQKVTRDNPSPRAYFKCSYAPSCPVKKKVQRS

SEQ ID NO: 32838 - protein, 286 aa, Glycine max
  Clone ID: TF_GmC94_2.pep
MKPCDHKVQLVRGIKTFLDWNMAKLGCSSRRKAIEELLRGRDCAKQLRSVINGSCEDGSSTTPSFAEQLVKEVLMSFTNSLSFLKNNPTSESHDVSNVQVCESPKSEDSQESNCKSSIIKERRGCYKRRRTEQTWEKESEAPIDDGHQWRKYGQKEILSAKFPRNYYRCTHKFDQGCQATKQVQRVQEEPILYKTTYYGLHTCKNLANPEIILDPMSPSSSSKFLSFDNSFPTPSKQECPFLSSSNLPSSVKGGVQGGGPLPQLSHHISSLLTSLLIVTRHHVLYH

SEQ ID NO: 32839 - protein, 66 aa, Glycine max
  unsure (1)..(66): unsure at all Xaa locations
  Clone ID: TF_700832484H1.pep
MTLQRVVTVPHIILEMADIPPDDYSWRKYXHKPIKGAPHPMGHYECSRVTGCPARKHVERALGDPA

SEQ ID NO: 32840 - protein, 59 aa, Glycine max
  Clone ID: TF_701123986H1.pep
AGLLKTQRPSLKGGKEIKQHRYAFQTRSHVDILDDGYRWRKYGEKSVKNNKFPRFVLLH

SEQ ID NO: 32841 - protein, 146 aa, Glycine max
  Clone ID: TF_8283852.pep
EYRSNNAEACPDAAEDVLDRSSSQSWGSSKLEEQPKTAEQLPAEQIPLRKARVSVRARSEAPMISDGCQWRKYGQKMAKGNPCPRAYYRCTMAVGCPVRKQVQRCADDKAVLITTYEGHYNHPLAAGRTGMANTTSTAATMLLSGS

SEQ ID NO: 32842 - protein, 255 aa, Glycine max
  Clone ID: TF_GmC667_1.pep
MDSKFRKKNRNVNSYTSEQDQDTDIAQENLAESPPSSTVFNIDGLVPSPTSSSKRRRAIQKRVVQIPMKETEGCRLKGESNTPPSDSWAWRKYGQKPIKGSPYPRGYYRCSSSKGCPARKQVERSCVDPTMLVVTYSSDHNHPWPPSRNHARPTKKPEPVPDPVEPEEKFADESMITTAEELGWLGEMEATSSTVLESPFMATTYHADVALIPMREEDESLFADLGELPECSVVFRQGLLAERRRYTAPWCGTTS

SEQ ID NO: 32843 - protein, 369 aa, Glycine max
  Clone ID: TF_GmC351_2.pep
MHTFFLCLILLSLSLSLLHPSIFSFSSSHGVIAPTMAVDLMTTGCSRNDNINSFTTKAEENAVQEAASGLESIEKLIRLLSQTQTQTRHQINNNSSNEIAIAMDCKVVADVAVSKFKKVISLLGRTRTGHARFRRAPLPNQNQHTQPPSEPPVFHATPLHQIPPPSLHQIPKTERNLNDSSSSKTIHFSYPSAATSFISSLTGDGAADNKQPSSSPPAAAATTTPFQITSLSHVSSAGKPPLSTSSFKRKCSSENLGSGKCGSSSSRCHCSKKSRKMRLKRVVRVPAISLKMADIPPDDYSWRKYGQKPIKGSPHPRGYYKCSSVRGCPARKHVERALDDPAMLVVTYEGEHNHTLSAADATNLILESS

SEQ ID NO: 32844 - protein, 72 aa, Glycine max
  Clone ID: TF_jC-gmXLIB3563P059ch12a1.pep
KYGQKMAMGNPCPTAYYRCTMGVGCPIGKPDQPGADDRTILVTTYEGAHNHPLPPAGVVDAVDIPSRGCGWI

SEQ ID NO: 32845 - protein, 208 aa, Glycine max
  Clone ID: TF_GmC3118_4.pep
MKMIHFLFLFALVSFTSHASVNDFCVADLKGPDSPSGYQCKPPNTVTVDDFVFSGFVAGNTTNTFNAALTSAFVTDFPGVNGLGVSAARLDIAKGGSIPMHTHPAATELLIMVEGQITAGFMTPTALYTKTLKPGDIMVFPQGQLHFQVNSGNGKATAFLAFSSANPGAQLLDLLLFGNTLPSDLVAQTTFLDVAQVKKLKARFGGRG

SEQ ID NO: 32846 - protein, 261 aa, Glycine max
  Clone ID: TF_GmC667_2.pep
MDSKFRKNNRNSYTSEQDQDTDHDVAQENIAESPPSSTVFNIDGLVPSPTPSSKRRRAIQKRVVQIPMKETEGCRLKGESNTPPSDSWAWRKYGQKPIKGSPYPRGYYRCSSTKGCPARKQVERSCVDPTMLVVTYSSDHNHPWPPSRNHARPTKKPEPVPDPVQPEPEEKFADLGGDDSMITTAEELGWLGEMETTSSTVLESPIMATGYHADVALIPMREEDESLFADLGELPECSVVFRQGLLTERRRYTAPWCGTTS

SEQ ID NO: 32847 - protein, 208 aa, Glycine max
  unsure (1)..(208): unsure at all Xaa locations
  Clone ID: TF_GmC1123_4.pep
HSGKLLNHTTDPSTSPEAAMRKARVSVRARSEAPMISDGCQWRKYGQKMAKGNPCPRAYYRCTMAVGCPVRKQVQRCAEDRTILTTTYEGTHNHPLPPAAMAMASTTAAAASMLLSGSMTSADGIMNPNLLTRAILPCSSMATLSASAPFPTVTLDLTHNQNAFQNYQRPQTPLFPSQPQDFIAGSTPPQLPQLIAQALYXQSKFSGL

SEQ ID NO: 32848 - protein, 246 aa, Glycine max
  unsure (1)..(246): unsure at all Xaa locations
  Clone ID: TF_GmC652_2.pep
GQFGITHQQMLAQISSQAVQTHSEHPFSISAVSATSSCAAQQLIPPSMPDSKVKESLDYSHSEQKLQSSVNVDNKPNNDGYNWRKYGQKHVKGSDFSRSYYKCTRPNCPVKKKLERSLEGHVTAIIYKGEHNHQRPHRSKIVKETQTSNENSVSKMDLGSSQATGEHGSGTRDSEEVHDHETEAVGKFYDSAETQKSGSRXPASLHRTVAETRIIVQTTSEVDLLDDGYRWRKYGQKVVKGNPYPR

SEQ ID NO: 32849 - protein, 93 aa, Glycine max
  Clone ID: TF_GmC1323_1.pep
LRLKRVIRVPAISSKNADIPPDEYSWRKYGQKPIKGSPHPRGYYKCTSVRGCPARKHVERAVDDSNMLVVTYEGEHNHSQITSEVANVILESS

SEQ ID NO: 32850 - protein, 222 aa, Glycine max
  Clone ID: TF_GmC127755_2.pep
MVRGGGLQSMDSDPIGSFFLHKPIVLNSFPAEDTNNKWKKLSLHHNMDATASNTKDNTIPFQVSLRCSPNNHGDGILVPRQFMDLGLAANNGTSTGIEPSSSSGGRSQDRSRSPNVEVASKELGTNDEEEKKEYGRGIEREDDSPSGHAHKVPRFSPPKDNNSVEAEATMRKARVSVRARSETPMIADGCQWRKYGQKMAKGNPCPRAYYRCSMASACPVRK

SEQ ID NO: 32851 - protein, 104 aa, Glycine max
  Clone ID: TF_LIB3051-037-Q1-K1-F6.pep
KSRAAPKCKKSKKSQNKSVVKQVTTAEGLDDAWAWRKYGQKPIKGSPYPRSYYRCSSSKGCLARKQVERSHLDPAVFLVTYTAEHSHPHPTRRNSLAGTTRKNN

SEQ ID NO: 32852 - protein, 120 aa, Glycine max
  Clone ID: TF_GmC1330_4.pep
SSAHRKKCRDAAPALSTKPSCHCSKKRKSRVKRTIRVPAVSSKIADIPSDEYSWRKYGQKPIKGSPYPRGYYKCSTVRGCPARKHVERAQDNPKMLIVTYEGEHRHVLPLTAAAGVSFGH

SEQ ID NO: 32853 - protein, 54 aa, Glycine max
  Clone ID: TF_LIB4390-038-R1-K1-B9.pep
FPLFIFRGYYKCSSMRGCPARKHVERCLEEPTMLIVTYEGEHNHPKLPTQSANA

SEQ ID NO: 32854 - protein, 225 aa, Glycine max
  Clone ID: TF_GmC855_1.pep
ICVHETIRRREMKKRVVTIPIGDVDGSKSKGENYPPSDSWAWRKYGQKPIKGSPYPRGYYRCSSSKGCPARKQVERSRVDPTKLIVTYAYEHNHSLPLPKSNSSAASAAVSDGATSSSPADSAARYPPEEEMKVFATDSDLELAGDAAVLLSHHHHHHFGWFDDVTSTGVLESPICGEVDDVAVPMREEDESLFADLGELPECSAVFRRRNIPATSAIRCGGITG

SEQ ID NO: 32855 - protein, 191 aa, Glycine max
  Clone ID: TF_GmC1329_1.pep
MGSNGVTGNPGPSYSPPGGCTGRVPLGGALAPGEIDILDDGYRWRKYGQKVVKGNPNPRSYYKCVAPGCPVRKHVERASHDMKAVITTYEGKHIHDVPLGRGNSSYSMNRNSLNNTSNNTNTSNVTAPAPIRPSALTNYSNSASFTNSLHDTKQPTSAGQEPFPMDLLLSPGSIGFSANDSFLQSFLSKNF

SEQ ID NO: 32856 - protein, 39 aa, Glycine max
  Clone ID: TF_uC-gmroLIB3259P207a09a1.pep
AEQVNICSRRGLEGSLDDVYTWTKYGQKNILIAKFPRLD

SEQ ID NO: 32857 - protein, 316 aa, Glycine max
  Clone ID: TF_GmC362_1.pep
MAVELMGFPKLDEQKAIQEAASEGLKGMKHLIRTLSNQPSHLNTELTDVTVSKFKKLISLLNRTGHARFRRAPVQYSSPHAPVHNTNASTSSIQLPPPPQNPNIPALAQFPTPAPVAVHHTPVTLDFTKPHNALLSSNAKSVELEFSKETFSVSSNSSFMSSAITGDGSVSNGKIFLAPPATSAGKRPAFKKRCHEHREHSDDVSGNSKCHCVKRRKNRVKSTVRVPAISSKVADIPPDEYSWRKYGQKPIKGSPYPRGYYKCSTIRGCPARKHVERAPDDPAMLIVTYEGEHRHAVQAAMQENAAGVVGLVFEST

SEQ ID NO: 32858 - protein, 579 aa, Glycine max
  unsure (1)..(579): unsure at all Xaa locations
  Clone ID: TF_GmC421_1.pep
MASSSGSLDTSASANSFTNFTFSTHPFMTTSFSDLLASPTDNNKPPHGGGGGLSERTGSGVPKFKSTPPPSLPLSPPPISPSSYFSIPPGLSPAELLDSPVLLNSSNILPSPTTGAFVARSFNWKSSSGGNQRIVKEEDKGFSNFSFQTQXGPPASSTATYQSSNVTVQTQQPWSYQETTKQDNFSSGKSMMKTEKSSSMQSFSPEIASVQNNHSNGFQSDYGNYPPQSQTLSRRSDDGYNWRKYGQKQVKGSENPRSYYKCTYPKCPTKKKVEXLDGQHTAIVCKVTHNHPKPQNTRKNSSNSSSLAIPQSNPIIAEIPAHPXATHKCTQMDSASEPANSSISIGDDDFEQSSQKCKSGGDEYDEDEPDAKRWKIEGENEGMSAPGSRTVREPRVVVQTTSDIDILDDGYRWRKYGQKVVKGNPNPRSYYKCTHPGCPVRKHVERASHDLRAVITTYEGKHNHDVPAARGSGSHSVNRPMPNNASNPTNTAATAISPLQVIQHSDNSHQNQRSQAPPEGQSPFTLEMLQSPGSFGFSGFGNPMQSYMNQQQQQLSDNVFSSRAKEEPRDDMFLESLLC

SEQ ID NO: 32859 - protein, 55 aa, Glycine max
  Clone ID: TF_GmC362_5.pep
KCSPVRGCPARKHVERAPDDPAMLIVTYEGEHRHPVQAPMQENPAGVVGLVFEST

SEQ ID NO: 32860 - protein, 332 aa, Glycine max
  Clone ID: TF_GmC351_1.pep
MAVDLMTTGYTRNDNISSFTTKAEENAVQEAASGLESVEKLIRLLSQTQAQAQAHHQFNNNNSSSNEIAIAMDCKAVADVAVSKFQKVISLLGRTRTGHARFRRAPLPNQHQHTQPPSEPPVLHATPLHQIPPPSLHQIPKTEKHLNDSSSKTLHFSYPSAVTSFVSSLTGDAADNKQPSPAATTTTSHFQITSLSHVSSAGKPPLSSSSFKRKCSSENLGSGKCGSSSSRCHCSKKRKMRLKRVVRVPAISLKMADIPPDDYSWRKYGQKPIKGSPHPRGYYKCSSVRGCPARKHVERALDDPAMLVVTYEGEHNHTVSAADATNLILESS

SEQ ID NO: 32861 - protein, 97 aa, Glycine max
  Clone ID: TF_LIB4390-010-R1-K1-C1.pep
LCRKMRLKRVVRVPAIILKMADIPPDDYSWRKYGQKPIKGSPHPRGYYKCSSVRGCPARKHVERALDDPAMLVVTYEGEHNHTVSAADATNLILESS

SEQ ID NO: 32862 - protein, 147 aa, Glycine max
  Clone ID: TF_jC-gmXLIB3563P026cd04a1.pep
GHVIEIVYKSQHNHDPPHKIDTTKESKLLPSSEPKEESSVPKQSTKVLNNSDPSSSPKEPLQEAPCNGDKNLENSSNVENGKIILKEKHVNDREPKRRLNNGDLDSAVKHGKKPKFVVHATEDVGISGDGYRWRKYGQKLVKGNPHF

SEQ ID NO: 32863 - protein, 228 aa, Glycine max
  Clone ID: TF_GmC5708_2.pep
IYYCRGYYRCTYRNVQGCLATKQVQKSDEDPMICEITYKGRHTCTQASHLNKTVIPPSKTKVNLLGENKHQTHQIKNQPRQEKIEQQPPETFFTFGSSSGLEVKIEDIDHKEGIFPSFCFSSPSIVGSENGDDNNSSIFSYTMIENNLMESFSPAFISPTTSDIESNTFCHWGSTGLGQSVQSSGSDITDIVSAPTSVTNSPIMDLDFFFDKIDFDTDFPLSTMELCT

SEQ ID NO: 32864 - protein, 93 aa, Glycine max
  Clone ID: TF_GmC652_6.pep
RSYYKCTTQGCNVRKHVERASTDPKAVITTYEGKHNHDVPAAKNNSHTMASNTASQLKSHNTNPEKHNFGSRGMGGNEQQPVARLRLKEEQIT

SEQ ID NO: 32865 - protein, 294 aa, Glycine max
  Clone ID: TF_GmC1067_1.pep
MEMEPTCVDTSLNLNVIPSPHIDHLAGEVLFEELRRLSSENKRLTETLNHLCESYVALQKHLSEFSQLRNANFDKEGTCAVPSLKRKPESENCVNLFGTECNTITEEETFKRPKHSTEPKVSKVLTRTDASDTGLYVRDGYQWRKYGQKVTRDNPSPRAYFKCSYAPSCPVKKKVQRSVEDPSVLVTTYEGEHNHGQQHQTAEISINSSSKSETPRPAVSPSAMNIRSSAAAGPIVTLDLVKSKVVDINAQKSSLQQFLVHQMATSLTRDPNFTAALASAISGRILDDTSVGKR

SEQ ID NO: 32866 - protein, 154 aa, Glycine max
  Clone ID: TF_LIB4204-001-Q1-K1-F2.pep
MSSSSTSFSPDQHLSPSDQLCYVHCNFCDTVLAVSVPCTSLFKTVTVRCGHCTNLLSVNMRGLLLPSANQLHLGHSFFTPQNLLEEIRNAPSTNMMMNQLPNPNDLVMSTMRGGPEETPKPPSANRPPEKRQRVPSAYNRFIKDEIQRIKAGNP

SEQ ID NO: 32867 - protein, 148 aa, Glycine max
  Clone ID: TF_10847320.pep
STLQPKESSSEQDANKTLKRHNASMMTYSDCEEEDAIPMSNVVNKPPEKRQRTPSAYNCFIKEEIKRLKAENPDMAHREAFSTAAKNWANFPPTQCKEDEESCSSQTDQHVDLDSQVDPNAVVNEEEGQGLRGRKVPKKSILERTPFE

SEQ ID NO: 32868 - protein, 182 aa, Glycine max
  unsure (1)..(182): unsure at all Xaa locations
  Clone ID: TF_jC-gmXLIB3563P040dh04d2.pep
VSVPCTSLFKTVTVRCGHCTNLLSVNMRGLLLPSANQLHLGHSFFTPQNLLEEIRNAPSTNMMMNQLPNPNDLVMSTMRGGPEETPKPPSANRPPEKRQRVPSAYNRFIKDEIQRIKAGNPDISHREAFSAAAKNWAHFXHIHFGLMPDNQPVKKANVRQEQRTCLXKDGCFAPANGGVSPY

SEQ ID NO: 32869 - protein, 185 aa, Glycine max
  Clone ID: TF_GmC4246_1.pep
MSMEMMATERVCYVHCNFCNTILAVSVPYSSLLTIVTVRCGHCANLLSVNMGASLQAFPPQDPQSQKQHLSFQEPSSKELGSSSKCSKIAPFEAVEHELPRIPPIRPTEKRHRVPSAYNRFIKEEIQRIKASNPDISHREAFSSAAKNWAHFPHIHFGLKNLKLDGNKQEKLDQGEGAEKSNGFY

SEQ ID NO: 32870 - protein, 216 aa, Glycine max
  Clone ID: TF_GmC47784_1.pep
MSSSSTSFSPDQQHLSPSDQLCYVHCNFCDTVLAVSVPCTSLFKNVTVRCGHCTNLLSVNMRGLLLPSANQLHLGHTFFTPQNLMEEIRNAPSTNMMMNQLPNPNDLVMSTMRGGPEETPKPPSANRPPEKRQRVPSAYNRFIKDEIQRIKAGNPDISHREAFSAAAKNWAHFPHIHFGLMPDNQPVKKANVRQEAEDVLMKDGFFAPANVGVSPY

SEQ ID NO: 32871 - protein, 167 aa, Glycine max
  Clone ID: TF_GmC4246_3.pep
FGHGDGPDSYVSVPCSSLLTIVTVRCGHCANLLTVNMGASLQTFPSQDTTQLQRQHLSVQEACSKELGSSSKCKSFETVDHEQQPRIPPIRPPEKRQRVPSAYNRFIKEEIQRIKASNPDISHREAFSTAAKNWAHFPHIHFGLKLDGNKQAKLDQGDGTQKSNGFY

SEQ ID NO: 32872 - protein, 75 aa, Glycine max
  unsure (1)..(75): unsure at all Xaa locations
  Clone ID: TF_LIB3107-069-Q1-K1-E1.pep
ARFLAAVXXASLWLXSXXXAFLLCVSSLLXRXXXXXXRCLFSGGRLXGLLGCCSWCSVSXVLXFXXXPXSLLRAS

SEQ ID NO: 32873 - protein, 182 aa, Glycine max
  Clone ID: TF_GmC39846_1.pep
MSSCSIDVAPEQLCYIPCNFCNIVLAVSVPCSSLFDIVTVRCGHCTNLWSVNMAAAFQSLSWQDVQGPGQCNPEYRIDTGSTSKCNNRIAMRAPTTHVTEERVVNRPPEKRQRVPSAYNQVIKEEIQKITAISPGVAFSTAAKTWAHFPHIHFGLMLESNNQVKMENVSEKHLMSRAALLNK

SEQ ID NO: 32874 - protein, 96 aa, Glycine max
  unsure (1)..(96): unsure at all Xaa locations
  Clone ID: TF_LIB4280-022-R1-K1-E5.pep
MTGCHCPAPEKRQRVPSAYNRFIKDEIQRIKSVNPDITHREAFSAAAKNWAHFPHIHFGLMPDQTVKKTNVCQQDGEEVLMKDGFYASANXGVSPY

SEQ ID NO: 32875 - protein, 113 aa, Glycine max
  Clone ID: TF_GmC47784_4.pep
AKGSAKLFNVPVCLPVQCPCVVCPAPEKRQRVPSAYNRFIKDEIQRIKAGNPDISHREAFSAAAKNWAHFPHIHFGLMPDNQPVKKANVRQEAEDVLMKDGFFAPANVGVSPY

SEQ ID NO: 32876 - protein, 302 aa, Glycine max
  Clone ID: TF_GmC51271_1.pep
PRVRPRVRTAARRRQKGRSASFFLSLSLSLSAPFFHNSIKKSISKVWWLSCPSINQSNQSRDQSSTEYKRTKKGGYPQRHPLSPHYHWSCILWLFLRRHLPPSEQLCYVHCNICDTVLAVSVPCTSLFKTVTVRCGHCTNLLPVNMRGLLMPSPTQFHLGHSFFSPSHNLLEEIPNPSPNFLMNQTNLSASNEFSMPARIAADELPRPPIMNRPPEKRQRVPSAYNRFIKDEIQRIKSVNPDITHREAFSAAAKNWAHFPHIHFGLMPDQTVKKTNVCQQDGEEVLMKDGFYASANVGVSPY

SEQ ID NO: 32877 - protein, 147 aa, Glycine max
  Clone ID: TF_GmC4246_5.pep
MSMDMMATERVCYVHCNFCNTTLAVSVPCSSLLTIVTVRCGHCANLLTVNMGASLQTFPSQDTTQRFSTVGKLQRQHLSVQEACSKELGSSSKCKTFETVDHDQQPTIPPIRPSEKRQRVPSAYNRFIKEEIQRIKASNPDISHREA

SEQ ID NO: 32878 - protein, 292 aa, Glycine max
  Clone ID: TF_GmC211_1.pep
MKIQCNVCEAAEAKVLCCADEAALCWECDEKVHAANKLASKHQRVPLSLSASHMPKCDICQEMVGYFFCLEDRALLCRNCDVSIHTANACVSDHQRFLLTGVRVGLEATERGASSSSVKSQSGEKMSDAKSSSISRNVSSLPQPSNANEVLPLQMQGVEEFPPSNFSGYTSGNVSQWPIEEFLGLNELSQYYNYMDGSSKADSGKLGDSDSSVLRSGEEDMDDDGFLGRVPDSSWTVPQIPSPPTASGLYWPKVPQYTSDSAMSVPDICFSHVRQPHHAQHNSNVSKRRRQL

SEQ ID NO: 32879 - protein, 210 aa, Glycine max
  Clone ID: TF_700980420_FLI.pep
MKIQCNVCEAAEAKVLCCADEAGLCWECDEKVHAANKLASKHQRVPLSTSSSHMPKCDICQEALGYFFCLEDRALLCRKCDVAIHTANAYVSGHQRFLLTGVRVGLEATDPGASSTSLKSDSGEKVSDSSVSRKVSTAPQPSNYNEVLPAEVGGVGEFPSAKVSFGGGSTAGNISQWTIDEFIGLNEFSQNYDYMEGSSRYCRVQIHLLS

SEQ ID NO: 32880 - protein, 321 aa, Glycine max
  unsure (1)..(321): unsure at all Xaa locations
  Clone ID: TF_GmC1848_2.pep
MKIQCNVCEAAEAKVLCCADEAGLCWECDEKVHAANKLASKHQRVPLSTSSSHMPKCDICQEALGYFFCLEDRALLCRKCDVAIHTANAYVSGHQRFLLTGVRVGLEATDPGASSTSLKSDSGEKVSDSSVSRKVSTAPQPSNYNEVLPAEVGGVGEFPSAKVSFGGGSTAGNISQWTIDEFIGLNEFSQNYDYMEGSSRVCSXCLVCMVVWFCNFFFHPSFPDESVQADGGKLGDSDSPVLRSGEEEMEEEDDYLERVPDSSWTVPQIPSPPTSSGLCWPKDHTNLYGSSDSVLFVPDISFSLIQQSQISSICLRRWRQL

SEQ ID NO: 32881 - protein, 233 aa, Glycine max
  Clone ID: TF_GmC1581_1.pep
MKIQCDVCDKVEASVFCPADEAALCHSCDRTIHRANKLATKHARFSLHYPTSKDFPLCDICQERRAYLFCQEDRALLCRECDVPIHRANEHTQKHNRFLLTGVKLSGTCLDPASSSTNYTNNNRVTGSEGRNDARSRMNRPRSSVSNEENASNSSCKVEDNVASDTGSISTSSISEYLIETIPGYCFEDLLDASFAPNGFCKKQNFDHPWAFQDQKRTSGDTMAVPFLKLVIH

SEQ ID NO: 32882 - protein, 154 aa, Glycine max
  Clone ID: TF_GmC59541_1.pep
MRKCELCNSPAKLFCESDQASLCWKCDAKVHSANFLVTKHPRILLCHVCQSLTAWHGTGPKFVPTMSVCNTCVNNNSTETCSQQNHEDDDDDGTGEDHAENDDGGVAEDDDDDDDEENQVVPWTSTPPPPASTSSNSVTTSSTRFSDVEEGGSD

SEQ ID NO: 32883 - protein, 245 aa, Glycine max
  Clone ID: TF_GmC763_2.pep
MKIQCDVCNKQQASLFCTADEAALCDGCDHRVHHANKLASKHQRFSLSHPSAKHFPLCDVCQERRAFVFCQQDRAILCKECDVPVHSANDLTKNHNRFLLTGIKFSALDSPSTPPKPAGGNSLTNQQPQQQTGFTGSSISEYLINTIPGMEFEDFLDSHSLPFACSKNSDDMMLSMFGEGNMVSFSAGGIWVPQAPSSVQMDQQSGYKDTWETSIRSSFGDDSLLVPQMTPPSNVFNNKRSRLLW

SEQ ID NO: 32884 - protein, 212 aa, Glycine max
  Clone ID: TF_LIB4167-008-Q1-K1-H10.pep
MSGAEARPCDYCGNSTALLYCRADSAKLCFSCDREVHSTNQLFSKHTRTLLCDACDDSPATILCSTDTSVLCQNCDWENHNPALSDSLHERRPLEGFTGCPSVSELLSIVGFSDISKKSLLFSPQGSVADGFFGASEIEGLSDMFVWDAPSFVTLDDLISSSPSSHSFQAMKVPPLPKNRKAACGQHKEEILSQLRELPSLSLWTLNHMCNR

SEQ ID NO: 32885 - protein, 265 aa, Glycine max
  Clone ID: TF_GmC763_1.pep
MKIHCDVCNKHQASFFCTADEAALCDGCDHRVHHANKLASKHQRFSLTHPSAKHFPLCDVCQERRAFVFCQQDRAILCKECDVPIHSANDLTKNHSRFLLTGIKFSASATPYDYSSPPPPPPPPPKRNPVLDSPSTPSPPKPGGNSLTNEEEPGFTGSSISEYLINSIPGMKFEDFLDSHSLPFACSKNSDDMLSLFGEGNMVSFSPGGFWVPQAPPSSVQMDRQSGYRETREGSIRSSFGDDNFIVPQMSPPSNVSNKRSRLLW

SEQ ID NO: 32886 - protein, 349 aa, Glycine max
  Clone ID: TF_GmC830_1.pep
MSGEARSCDYCGHSTALLYCRADSAKLCFSCDREVHSTNQLFSKHTRTLLCDACDHSPATILCSTDTSVLCQNCDWEKHNPALSDSLHERRPLEGFTGCPSVSELLSIVGFSDISKKSLLFSPQGSVADGFFGGEIEGLSDLFVWDAPSFVTLDDLISSSPSSHSFQAMEVPPLPKNRKAACGQHKEEILSQLRELAKSEPLDLEPYVSSGNLSSGFEREPEADIFPSHEWHRESSEPMYQVVPPDPLMRTYTEEIPFKHSTSAVGETQTYGDNGGKPSISLKSETLSTTPKAAACELTSQERDSALLRYKQKKKTRRFDKHIRYESRKVRAESRVRVKGRFAKMEHEH

SEQ ID NO: 32887 - protein, 172 aa, Glycine max
  Clone ID: TF_GmC1095_2.pep
MKKCELCKVPARIFCESDQASLCWDCDAKVHSANFLVARHVRTLLCRTCRSPTPWKASGASLAHAASVCDRCAAAEETEESEAGNDDEPDTEDDDDVDNQVVPWSSTPPPPPPSSSSGSECSECKNNVASFSASEQETTTSSLKRQREDDDDASSDPDPQVLRRVGRLTEVA

SEQ ID NO: 32888 - protein, 241 aa, Glycine max
  Clone ID: TF_GmC998_2.pep
MKGKTCELCDQQASLYCPSDSAFLCSDCDAAVHAANFLVARHLRRLLCSKCNRFAGFHISSGAISRHLSSTCSSCSPENPSADYSDSLPSSSTCVSSSESCSTKQIKAEKKRSWSGSSVTDDASPAAKKRQRSGGSEEVFEKWSREIGLGLGLGVNGNRVASNALSVCLGKWRWLPFRVAAATSFWLGLRFCGDRGLASCQNLARLEAISGVPVKLILAAHGDLARVFTHRRELQEGWGES

SEQ ID NO: 32889 - protein, 310 aa, Glycine max
  Clone ID: TF_GmC1833_1.pep
MASKLCDSCKSATATLYCRPDAAFLCGACDSKVHAANKLASRHPRVVLCEVCEQAPAHVTCKADAAALCLACDRDIHSANPLASRHERIPVTPFFESVHSVKASSPINFHHRFFSDADADADVSTEEAEAASWLLPNPKTDLNSSQYLFSETEPVPYIDLDYAAMDPKTEQKSSATADGVVPVQSNFEPFTYGYKYNTTLSQSQSHMSQSVSSPSSMEVGVVPDGNTMSEISNCSYSKVAPVTVTAQFSAADREARVLRYREKRKNRKFEKTIRYASRKAYAETRPRIKGRFAKRTDADPLAGYGVVPSC

SEQ ID NO: 32890 - protein, 177 aa, Glycine max
  Clone ID: TF_GmC1095_1.pep
MNKCELCKVPARIFCESDQASLCWDCDAKVHSANFLVARHARTLLCRTCRSPTPWKASGASLASAVSVCDRCAASEEPEESEAGNDDEPDTEDDDNDDEDGDNQVVPWSSSPPPPPPSSSSGSEWSECKNDDASISASEQETTTCSLKRQREDDDDASSDRDPRVLRRVGRLNGGCV

SEQ ID NO: 32891 - protein, 235 aa, Glycine max
  unsure (1)..(235): unsure at all Xaa locations
  Clone ID: TF_GmC115_1.pep
MKIQCDVCERAPATVICCADEAALCAKCDVEVHAANKLASKHQRLLLQCLSSKLPTCDICQDKPAFIFCVEDRALFCQDCDEPIHSAGSLSANHQRFLATGIRXVASSSNCTKDNEKSHLEPPNRSAQQVSAKIPPQQVPSFTSSWAVDDLLELTRLXNHPEKKESLXLQEVEWLTGCGYFWLNEFCSXEALAAAEVPQLPETHNSSSVASYKTSKSYMSHKKPRIEVLNDDDDD

SEQ ID NO: 32892 - protein, 238 aa, Glycine max
  Clone ID: TF_GmC115_2.pep
MKIQCDVCEKAPATVICCADEAALCAKCDVEVHAANKLASKHQRLLLQSLSNKLPRCDICQDKPAFIFCVEDRALFCKDCDEPIHLASSLSANHQRFLATGIRVALGSNCTKGNEKGHVEPSKPKAQEVPAKIPSQQVPSFTSSWAVDDLLELTDFESPDKVQKQSLEFGELEWLADVGLFGEQFPHEALAAAEVPQLPMTSSVGSHKAPKSLLSYKKPRIEVLDEDDDEHFTVPDLG

SEQ ID NO: 32893 - protein, 238 aa, Glycine max
  Clone ID: TF_GmC115_3.pep
MKIQCDVCEKAPATVICCADEAALCAKCDVEVHAANKLASKHQRLLLQCLSNKLPRCDICQDKPAFIFCVEDRALFCKDCDEPIHLASSLSANHQRFLATGIRVALGSNCTKGHEKGNMEPSNPNAQEVPVKTPSQQVPSFTSSWAVDDLLELTDFESPDKKQSLEFGELEWLADAGLFSEQFPHEALVAAEVPQLPVPHTSSVASHKAPKSLVSYKKPRIEVLDEDDDEHCTVPDLG

SEQ ID NO: 32894 - protein, 186 aa, Glycine max
  Clone ID: TF_GmC1732_1.pep
MRTLCDACESAAAIVFCAADEAALCRACDEKVHMCNKLASRHVRVGLASPSDVPRCDICENAPAFFYCETDGSSLCLQCDMIVHVGGKRTHGRYLLFRQRVEFPGDKSSHAENPASQPLEPGEAKRGQNPLPKLKMGEKQQNHKMPMVPTPGPDADGHAKMESKMIDLNMKPNRIHEQASNNQKHP

SEQ ID NO: 32895 - protein, 186 aa, Glycine max
  Clone ID: TF_GmC272_1.pep
MVSAAAFYIKRVQPEVLYVVSYVGYRLHCIAKLMMPNLFKKLPSSKLDYYYYYYHYPIELLKMCKGAEGEKQHGFCSSYLHKECATRSATCCELCGLQASLYCQADDAYLCRKCDKRVHEANFLALRHIRCFLCNTCQNLTRRYLIGASIEVVLPANINWTIGNLPSNRGIHRKCSRMHNNLSLLL

SEQ ID NO: 32896 - protein, 278 aa, Glycine max
  Clone ID: TF_GmC1358_1.pep
MKIQCDVCNKHEASVFCTADEAALCDGCDHRVHHANKLASKHQRFSLLRPSPKQHPLCDICQERRAFTFCQQDRAILCKECDVSIHSANEHTLKHDRFLLTGVKLSASAMLRSSETTSDSNSNPSLLNFSHQTTLLPPSSTTTTTTSNNNNNKVAVEGTGSTSASSISEYLIETLPGWQVEDFLDSYSVPFGFCKNDEVLPRFDGEMEGHLSSFSTENMGIWVPQAPPTLMCSSQMDRVIVHGETNIKGSSRSRLKDDNFTVPQISPPSNSKRARFLW

SEQ ID NO: 32897 - protein, 276 aa, Glycine max
  unsure (1)..(276): unsure at all Xaa locations
  Clone ID: TF_GmC1358_2.pep
MKIQCDVCNKHEASVFCTADEAALCDGCDHRVHHANKLASKHQRFSLLRPSHKQHPLCDICQERRAFTFCQQDRAILCKECDVSIHSANEHTLKHDRFLLTGVKLAASAMLRSSQTTSDSNSTPSLLNXFTSNYSTSSSPPPPPXNNNNNKVAVEGTGSTSASSISEYLIETLPGWQVEDFLDSYFVPFGFCKNDEVLPRLDADVEGHMGSFSTENMGIWVPQAPPPLVCSSQMDRVIVQSETNIKGSSISRLKDDTFTVPQISPPSNSKRARFLW

SEQ ID NO: 32898 - protein, 293 aa, Glycine max
  Clone ID: TF_GmC1848_3.pep
MKIQCNVCEAAEAKVLCCADEAALCWECDEKVHAANKLASKHQRVPLSTSSSHMPKCDICQEALGYFFCLEDRALLCRKCDVAIHTANAYVSGHQRFLLTGVRVGLEAIDPGASLTSLKSDSGEKVSDTKSSSVSRKVSTVPQPSNYNEVLPIEVGGVGEFPPAKVSFGGGSTDGNISQWTIDEFIGLNEFSQHYDYMEGSSRADGGKLGDSDSPVLKSGEEDMEEEDDYLERVPDSSWTVPQIPSPPTASGLCWPKDPQYSSDSVLFVPDISFSLIQQSQISSICLRRWRQL

SEQ ID NO: 32899 - protein, 257 aa, Glycine max
  Clone ID: TF_GmC127847_1.pep
MKVNKEKEKELSSSSNNNSLDDETAVTVALHLGLPSTTIASSESADLASSLYSDKEEEEEKVALMLRGILLSNRINRGQYWIPTSSQILIGPTQFPCPLCFKTFNRYNNMQMHMWGHGSQYRKGPESLRGTQPTAMLRLPCYCCAPGCKNNIDHPRAKPLKDFRTLQTHYKRKHGIKPFMCRKCCKAFAVRGDWRTHEKNCGKLWYCSCGSDFKHKRSLKDHIKAFGNGHKAYGIDSCLDQDDEAGSEIEQENNESF

SEQ ID NO: 32900 - protein, 459 aa, Glycine max
  Clone ID: TF_GmC4128_1.pep
CEICNKGFQRDQNLQLHRRGHNLPWKLRQRSNKEVRKKVYICPEQTCVHHDPARALGDLTGIKKHFSRKHGEKKWKCEKCSKKYAVQSDWKAHTKTCGTREYKCDCGTLFSRKDSFITHRAFCDALAEESARLTSVTTTNLNFKSEEGGNNVMNSQQHGLGGHGLIGAQSLQNVSGIPQFGSHGFRLDFNGMEQQIRPSLSLWLNQGNHQMNSNNNNINSNNNSASDAGPNYMSSSGLPEIVQMAHANALMGCSSSMVSNFGGVHAGSNSSSANLSLGKRGEACGSTVVDLASIYNNSEGQNKNSKPASPMSATALLQKAAQMGSTRSTNPSIFSGSFGVINSPSSQTTSLNNNNNGGAAMMLASNTSTAAANANDFSSLRHSSNSFDQLVMQTNAQLQSEPVKLKLHSNGVENNLTRDFLGVSGGGGGGGGPQFLPQELAKFASMGSPMGLSQFTSNQ

SEQ ID NO: 32901 - protein, 318 aa, Glycine max
  Clone ID: TF_GM433K20.C25.o1.fg.pep
MPNATEQFSNINSIESLHVSLRNLSQLSTRMDSVQSFVSQSIQSHTLLTHHQMNIVSNEILTAIRHVITNGVALVAASENALPLSETPTLDSPNNNDDDNVVELDAMELLAKHLHFCEVCGKGFTRDANLRMHMRAHGDEFKTPEALANKARGETRLKATRFSCPLEGCNRNKTHKKFRALKSVFCLRNHFKRSHCPKTLLCERCRKKSFAVLSDLRSHVKQCRGEATWKCSCGTTFSRKDKLLGHVALFEGHSPMLGEERDTVVAAAAEGLPEGFFDGLDEFGFGSIQNNSSQEEHLALGLPTNNLDAWEFSFSNLI

SEQ ID NO: 32902 - protein, 353 aa, Glycine max
  unsure (1)..(353): unsure at all Xaa locations
  Clone ID: TF_GmC48528_2.pep
MSNSNCNPTRILHSQSQDPNTTTADPHVLLQNLSLVRTRMDSLQHFLSQSINTNTPLAVDQIAMVSSQIVSSIHQLIVNGSALVSYSQNSTAASGAPDPPLYPKKPEPEPSVADKAKQILDSKFGPLEDDDDDDGGAEDFDDGSGIVELDAIEILAEHMHFCEICAKGFRRDSNLRMHMRAHGEQFKTVEALAKPSETTAQRGATRFSCPFEGCNRNSXHRRFRPLKSVICVKNTSSGPLPEDDTCERXRKKHFSVLSDLRNHSKHCGGEARXKCTCGTTFSSKDKLFGHIAMFEGHALALVCDKEGKGKQMVEDDKDPMLMSESGFELNDCFLDQEFPEGFFDDFGSIDDYC

SEQ ID NO: 32903 - protein, 112 aa, Glycine max
  Clone ID: TF_GmC73788_1.pep
MTEPQNPSPLTHSPALEITPQPLLPPKRKRSLPGMPDPDAEVIALSPKTLLATNRFVCEICNKSFQRDQNLQLHRRGHNLSWKLTQRGSTEPRKKAYVCPEPCCVHHNPARA

SEQ ID NO: 32904 - protein, 93 aa, Glycine max
  Clone ID: TF_GmC2530_12.pep
MAAASSSTPFLGIREESPQITTHHQPSTVSPTTAPQKKRRNQPGTPYPDAEVIKLSPKTLMATNRFICEVCNKGFQREQNLQLHRRGHNLPWK

SEQ ID NO: 32905 - protein, 93 aa, Glycine max
  Clone ID: TF_GmC2530_6.pep
MAASSSSASLFGFREEDQNQMKQQHSLTPSSSTTPAAPPPQKKKRNQPGTPYPDAEVIALSPKTLMATNRFICEVCNKGFQREQNLQLHRRGH

SEQ ID NO: 32906 - protein, 96 aa, Glycine max
  Clone ID: TF_GmC150983_1.pep
DEINQVWQAATTRDGVGQSSGSGNRNDHQVEQCPQCGSKFSSVTALVDHVQKVHERNGNRLGVKKIDACPKCSRGFLDPVSLVEHVERDHGGGSRA

SEQ ID NO: 32907 - protein, 100 aa, Glycine max
  unsure (1)..(100): unsure at all Xaa locations
  Clone ID: TF_GmC2530_11.pep
MAAPFSAASLFAIREEDQNQMKQQHSSTPSSSTTPAAPPPQKKRRNQPGTPYPDAEVIALSPXTLMATNRFICEVCNKGFQREXNLQLHRRGHNLPWKLK

SEQ ID NO: 32908 - protein, 121 aa, Glycine max
  Clone ID: TF_LIB4281-040-R1-K1-G1.pep
PRVREFLPENTNQRIVGISNSCLYLFIRKNVRSRRIEERPKYKDIRRYYCEYCGICRSKKTLITSHINLHHKEEYEKARAKRDPEAEASKSNTCEECGATFKKHAYLLQHMQSHSLEESNL

SEQ ID NO: 32909 - protein, 370 aa, Glycine max
  Clone ID: TF_GmC168_4.pep
CLHHDPCHALGDLVGIKKHFRRKHSNHKQWVCERCSKGYAVQSDYKAHLKTCGTRGHSCDCGRVFSRVESFIEHQDACNMGRLRPESQPLQPSACLSRTASSPSPSSETNFSTAPWPTRMIIPKPSEPPTIFMNNPITAITTAETSSKSNNKLLHPNLDLQLSTPTTTNNTSNVANRIDAAISPKRDHHHHHENHSTHLQLSIGSSDMSEKNESNRNSSEKSSNSNINDQNNNNKQSNNMALLRVQEQAREHLRIAMAEKAYAEEARKQAKRQIELAEQEFTNAKRIRQQAQAELDKAYSLKEHAMKQINSTMLQITCHGCKQQFQARNAATTPDENSLVLSYVSSAITTEGGGEVENDNNAKDHGKDNN

SEQ ID NO: 32910 - protein, 122 aa, Glycine max
  Clone ID: TF_GmC320119_1.pep
SLKIPNGVKNNMCSTTTTTTKAKVHECSICGAEFSSGQALGGHMRRHRTLVNASLATSMSGGNVVGVGGNNEFQEAKKPLKLDLNLPALPEDDHRESKFSFQQREKNVIVFSKQSSLVDCHY

SEQ ID NO: 32911 - protein, 150 aa, Glycine max
  unsure (1)..(150): unsure at all Xaa locations
  Clone ID: TF_GmC331407_1.pep
RSHTGTSTRDCQYCGRTFSRNDVLQRHLKTHVGHQVGDGRPRASPSPSIAPEVPDSRSIIHQTPQIQQDQIYPQDPLSANTNLTVQAGPSTGDSAITGPVYTTQQDEAWRILHGLVQATQPVSAPSYSLKQDVINPFPDMFSNQAAXSWD

SEQ ID NO: 32912 - protein, 111 aa, Glycine max
  Clone ID: TF_GmC1674_1.pep
MYNGCSDDSAYGSDENSTDTDSYPAPKAHSNRNNLSVQKGKKKKKLKSKKSKAHECPICNKIFRSGQALGGHKRSHFVGGSEENTLVIRPSAPPAAVPCLIDLNLPAPVDE

SEQ ID NO: 32913 - protein, 463 aa, Glycine max
  unsure (1)..(463): unsure at all Xaa locations
  Clone ID: TF_GmC135_1.pep
IFDVPKTMSNLTSASGEASASSGNRTEIGTDYSQQYFAPPLSQAQPPPLKKKRNLPGNPDPEAEVVALSPKTLLATNRFICEICNKGFQRDQNLQLHRRGHNLPWKLKQRSSNEIIRKKVYVCPEASCVHHDPSRALGDLTGIKKHFCKKHGEKXKWKCDKCSKKYAVQSDWKAHSKTCGTREYRCDCGTLFSRRDSFITHRAFCDALAEESSRSVTGIGIVANSTSTQPTAAAASHQQDIIHGNSNNFSLKKEQQAGFRPPWIGQPSPSSASSFLVSHQENPNPRGGGPIPTLLPPYQTAPHMSATALLQKASHMGATMSKTGSMIGTHQQQAHVSANAALNLSSRDHQMTPTLHGLVPFGNKAVPAVGNGVSPSLLHHIIDSFSSPFEGTSFEDTFGGAGGDAMTKTTTADDGARGNNNEALTRDFLGLRPLSHTDILNIAGMGSCINSSQHNQTPNPWQG

SEQ ID NO: 32914 - protein, 294 aa, Glycine max
  unsure (1)..(294): unsure at all Xaa locations
  Clone ID: TF_GmC135_2.pep
MEMKGFMFYQQQQQQQIVEENMSNLTSASGEASASSGNRTEIGTSYMAPPPTQIQPPKKKRNLPGNPDPDAEVIALSPKSLLATNRFICEICNKGFQRDQNLQLHRRGHNLPWKLKQRTSKEVRKKVYVCPEPSCVHHDPSRALGDLTGIKXHFCRKHGEKEWXCDSAQEYAVQSDWKAHSKTCGTREYRCDCGTLFSRRDSFITHRAFCDALAEESARAIANPLLPPQQQQSSSSHMSTLQTQFNPQNLHAFPLKKEMPPWLGPPATVVVDHHLSSSSSIMFSPPHQENDNPP

SEQ ID NO: 32915 - protein, 188 aa, Glycine max
  unsure (1)..(188): unsure at all Xaa locations
  Clone ID: TF_GmC23433_3.pep
MSNITSCDSGSFSTENTREDAAVKQQQSEMLGQFHSPHSHTSTTTTNNSNGSNTNSQPPAPVKKKRSLPGNPDPSAEVIALSPTTLMATNRFICEICNKGFQRDQNLQLHRRGHNLPWKLKQRTSTEIRKMIYXVCPDXPCVHHNPARALXGDLTGIKKHFCRKHGEKNWICDKCSKXYAVQSDWKAH

SEQ ID NO: 32916 - protein, 132 aa, Glycine max
  Clone ID: TF_GmC124792_1.pep
MNSEKPVSPEISSEENDHDQEDDTGGTKRSYECTFCKRGFTNAQALGGHMNIHRRDRAKAKQFTLDASPSVNKFNSNNNDSMALPFVSEIMNQPTRPNYSPLESQMNFHPPHAFYYEFCNSRSQPFSLNNQE

SEQ ID NO: 32917 - protein, 135 aa, Glycine max
  unsure (1)..(135): unsure at all Xaa locations
  Clone ID: TF_6847267.pep
DNHNHDYCDTTSTXFXXXXSXXLYNNNNSSSNXRMSTINAKCKVHECSICGAEFSSGQXLGGHMRRHRNFGSAPTCGAINANRESKKHNKDVLNLDLNLPAPEDDHHRESKLFPFQAKEKVIVFSATSSLVDCHY

SEQ ID NO: 32918 - protein, 98 aa, Glycine max
  Clone ID: TF_5770686.pep
MSYWNFPFTLQRKMEFNSQNPNQSEIRWSSDDQAGPGQVKYSCSFCQRGFSNAQALGGHMNIHRRDRAKLKQSAEEKLLSLDISIKTTGDPNDPSDLE

SEQ ID NO: 32919 - protein, 149 aa, Glycine max
  Clone ID: TF_GmC77129_1.pep
MLRNMDEGEIMTNIAFPQNLTASAASSDHNNPPPSLKRKRNLPGNPDPEAQVIALSPKTLMATNRFLCETCGKGFQRDQNLQLHRRGHNLPWKLKQRTGKEARKRVYVCPEKSCVHHDPSRALGDLTGIKKHFCRKHGEKKWKCEKCSK

SEQ ID NO: 32920 - protein, 77 aa, Glycine max
  Clone ID: TF_700743676H1.pep
TKKVLSLMERYKCKLCSRTFSNGIALGGHMKAHLATLPLPPQNQQPPLSPSAAASFSSNSSSEQDQATHGEKSLIYG

SEQ ID NO: 32921 - protein, 154 aa, Glycine max
  unsure (1)..(154): unsure at all Xaa locations
  Clone ID: TF_jC-gmro02910037d11a1.pep
MLEKMDDGEISNAFPHQNPSTAASNNQPPTLKRKRNLPGNPDPEAEVIVLSPKTLMATNRFVCEICLKGFQRDQNLQLHRRGHNLPWKLKQRTTKEVRKRVYXCPEKTCVHHHPSRALGDLTGIKKHFCRKHXEKKWKCEKCXKRYAVQSDWKH

SEQ ID NO: 32922 - protein, 166 aa, Glycine max
  Clone ID: TF_GmC38653_4.pep
NPKSVPHFLQRALPSHKSLVVCPLDIWLTRGIFNFPHIIPNMDPHMTIVATPFKKHLMTELALKLAILNYNSISNRRTKPVPPCRPLVKGQQVLQVQILLIEAHVALATFQQVMNLHIRKIFNPQQGNLLHSLISSRQTRHSHVHSNNLHLILIGSSSSRIIIGRQ

SEQ ID NO: 32923 - protein, 254 aa, Glycine max
  Clone ID: TF_GmC71690_1.pep
MAMEVEQNQNHQLGFPFWKPLRRRFGPESPFFAHGNLERELLAKQLALELTEEKQQLEKWMQEEEGREVFCPIVGCGARLTSMEDFENHYNARHTASCSVCSRVYPTSWLLSIHVSEVHDSFFQAKVARGYDMYECLVERCGLKFKSYNSRQQHLVDKHKFPTSFEFFKKAKPSKKHRLKSQRKQAVCKEDSSGMMEVENASMDDLVSAVSKLNTSDSTPSSISFGRRHKGLSFVPRAVQRGGGSNSTASVTKK

SEQ ID NO: 32924 - protein, 183 aa, Glycine max
  Clone ID: TF_10846993.pep
GSNKEVRKKVYICPEKTCVHHDAARALGDLTGIKKHYSRKHGEKKWKCEKCSKKYAVQSDWKAHTKTCGTREYKCDCGNLFSRKDSFITHRAFCDALADESSRLTSVASTSLNFKSEDATMINTQASLSTRGLITDHGMQNVSQFGPHGFRLMNMGTDQQRPNLSLWLNQGDHHINNPLDVAL

SEQ ID NO: 32925 - protein, 123 aa, Glycine max
  Clone ID: TF_GmC910_2.pep
MMTVLPLPVVTKQKLSFNLFMVLCQQKSNLDKHKKAVHLNVKPFACGFPDCGMRFAYKHVRDNHEKTAKHVFTLGDFEEADEEFRSRPRGGRKRTCPTVEVLIRKRVTPPSQLEHWLFMQDSE

SEQ ID NO: 32926 - protein, 94 aa, Glycine max
  Clone ID: TF_GmC1644_3.pep
SGCCIVVVCKVLVMDRHKCKLCSRSFSNGRALGGHMKAHLASLPLPLPPKLHSCFSSSDSEQEQSLRENPKKTLRILDPEDRESETESNKNPTR

SEQ ID NO: 32927 - protein, 358 aa, Glycine max
  unsure (1)..(358): unsure at all Xaa locations
  Clone ID: TF_GmC58470_1.pep
MADPYSNFFSSSSPLFRFNHNQYFPSSNPSPQHHNHNFINHTKTNDTTTTTAFFHYHQHQTTTAFSSFPPSPPLREELPLLKLSPTKQDEEEVEDLVSNCTGGAMDVEERIHLKEELEDDEDGSTSVTVALHIGLPSPSAAEMASVLSSSSHEITDKDQHGDHGAAEDSSSAGFRLNKGQYWIPTPSQILIGPTQFSCPVCCKTFNRYNNMQMHMWGHGSQYRKGPESLRGTQPTGMXRLPCYCCAPGCRNNIDHPRAKPLKDFRTLQTHYKRKHGIKPFMCRKCGKAFAVRGDWRTHEKNCGKLWYCICGSDFKHKRSLKDHIKAFGSGHAAYGIDGFEEEDEPASEVEQDNDDSTQ

SEQ ID NO: 32928 - protein, 192 aa, Glycine max
  unsure (1)..(192): unsure at all Xaa locations
  Clone ID: TF_LIB4164-053-R1-K1-F8.pep
MMSQEAIPAPSNNNNLRDSTVQLHEPNSNPNPNPNSVKRKRSLPGTPYPNAEVIALSPKSLMATNRFICEVCHTGFQRDQNLQLHRRGHNLPWKLRQRNREDVANKKVYVCPEKTCVHHDPCRALWDLTGIKEHFMXKHGAKKWXCEKCSKKHAVQSDWIAHSKMCRTTQYRCDCGTIFFMKDSFATHMAFV

SEQ ID NO: 32929 - protein, 259 aa, Glycine max
  Clone ID: TF_GM169K08.C11.o2.fg.pep
MEESQYLLWIKRKQILKSHIQQPFGTSNNNNSSSWEERAFAEDAARILGGCIWPPRSYSCNFCKREFRSAQALGGHMNVHRRDRARLKQSLSHHNEALQHHQKNDCTVATSKVSSSRASTISTQEICSHQPTMSLYSSLIGWGHHHHMESPDSEPKGQVNAREEFLKGLGCNDYVETSLSVGQSAVFGQKLPTTESCGDESISYKRSKTSMPPLPGVFLKPCSNDRNLTFQSAEFVLGLKPGMEDLDLELRLGKPQKVI

SEQ ID NO: 32930 - protein, 125 aa, Glycine max
  Clone ID: TF_GM169K08rgnG6.C1.o1.ma.pep
MEESQYLLWIKRKQILKSHIQQPFGTSNNNNSSSWEERAFAEDAARILGGCIWPPRSYSCNFCKREFRSAQALGGHMNVHRRDRARLKQSLSHHNEALQHHQKNDCKSSSAQFSEENFNFFLSSR

SEQ ID NO: 32931 - protein, 202 aa, Glycine max
  Clone ID: TF_GmC5902_1.pep
QVEDDDDSWEVRAFAEDTRNIMGTTWPPRSYTCTFCRREFRSAQALGGHMNVHRRDRARLHQAPVPSSSSNPMTSSLPTSPFINIPPQDLVANAGLCLLYHLPKSPSSTAPPFPPSPTTPSPSTLLSISSYPTTNFLMQTSFNFPGAPATGINTTTTTTVSSLCYNSSKVEQSATSSSIDHNGHLEELDLELRLGHKPTPTS

SEQ ID NO: 32932 - protein, 305 aa, Glycine max
  Clone ID: TF_GmC166371_1.pep
MEEDQCWIKSRRKYSMSSNLDSSTNYPSSYDDHSSWEEQAFAKDAARSGCTWPPRSYSCSFCRREFRSAQALGGHMNVHRRDRARLKQPYSPQNEILSVDLEKITTQPLNSVQISFTSLGYLYPSSLGVLTHNNTNPNSDPYSHAPPSPSKVLVSSINKRGREKPQIPLYKGCHESSPDLPSKSMSNLTEDFRFCSRRLDPEAGVEKKLKGLDSRCGSTEGDDDKTDVAVSLNLFMNLARPTVQFETKEKDTSFKKRKEDASSIPFFPKSCSVDRLHMQSKMFELSPSSIEELDLELRLGYRSMV

SEQ ID NO: 32933 - protein, 226 aa, Glycine max
  Clone ID: TF_GmC736359_1.pep
MEQGQCWTKRKKYSLSSSTGSPTNPSYGDSWEEQAFAEDAANSLGGCIWPPRSYSCSFCRREFRSAQALGGHMNVHRRDRARLKQQPTSPHNEILCHDLETQRHKPVQSPFASLGGYLYPSPLCGLACKKTNPNCDPDFVASPSSSPSPSKALLAPSANIGTFREETMIPLYDSSILHKISPASNSSESWPNSAEDHRLYSCKFHPQADTTKPSKGIMDFRCRGNK

SEQ ID NO: 32934 - protein, 356 aa, Glycine max
  Clone ID: TF_GmC1203_1.pep
MGKKKKRVSSKVWCYYCDREFDDEKILVQHQKAKHFKCHVCHKKLSTAGGMAIHVLQVHKESVTKVPNAKPGRESTDIEIYGMQGIPPDILAAHYGEEEDDVPSKAAKVDIPPTQLVGGMIPPPLGTGYPPRPTLPTMPPMYNPAVPVPPNAWMVPPRPQPWFSQPPAVSVPPAAPYTQQPLFPVQNVRPPLPATAPALQTQITPPGLPTSAPVPVSQPLFPVVGNNDTTTLNIQLMHIFFSVDANLRGYLSFTSIYHLIGVPVGVASNSHSYASGPNTGGPSIGPPPVIANKAPAPQPATNEVYLVWDDEAMSMEERRMSLPKYQVHDESSQMSSIDAAIDKRILESRLAGRMAF

SEQ ID NO: 32935 - protein, 321 aa, Glycine max
  Clone ID: TF_GmC1203_4.pep
MGKKKKRVSSKVWCYYCDREFDDEKILVQHQKAKHFKCHVCHKKLSTAGGMAIHVLQVHKESVTKVPNAKPGRESTDIEIYGMQGIPPDILAAHYGEEEDDVPSKAAKVDIPPTQLVGGMIPPPLGTGYPSRPALPTMPPVYNPAVPVPPNAWVVPPRPQPWFSQPPVVSVPPAAPYTQQPLFPVQNVRPPLPATAPALQTQITPPGLPTSAPVPVSQPLFPVVGNNHTTTQSSAFSAPPLPSSVPSVTPVMSTNVPVDTHLSSNSSVTSSYQAIGVPGGAASNSHSYASGPILGGSFIGPPPVIANKAPASQPATNEVYF

SEQ ID NO: 32936 - protein, 130 aa, Glycine max
  Clone ID: TF_GmC285225_1.pep
MSYCNFPFALQTKMEFNSQNPKKSEIRWSPDNQGGPGQGKSYSCYFCKRGFSNAQALGGHMNIHRKDRAAKLKQSSEENLLSLDISIKATSDHPNDPSDFEEKILFRLGAGEEKHPRNHKYPFNFFSSQR

SEQ ID NO: 32937 - protein, 156 aa, Glycine max
  unsure (1)..(156): unsure at all Xaa locations
  Clone ID: TF_uC-gmflminsoy034g08b1.pep
YASALTHSLLGLFFSPLASSSIIAIISKLTKTWGFSSSSSPYFSSLQPLSRCDADLGCCWFSLVIDFSCVGGDQESVVNFAFFADPCVCVILKNQSNGRRSRSETHVQVLQQELSLWKILGWPHEVTCHXQCFNRGREAFIFQQQWLRMRFCIRRD

SEQ ID NO: 32938 - protein, 53 aa, Glycine max
  Clone ID: TF_701129039H1.pep
EVCGVRFTRNDKLKIHMRKHTGERPYSCPHCPARFLHSYDHKNHMHLHTGVRP

SEQ ID NO: 32939 - protein, 243 aa, Glycine max
  unsure (1)..(243): unsure at all Xaa locations
  Clone ID: TF_LIB4390-021-R1-K1-C11.pep
MTHPYCSNDFNAWFDLNSPCLFSTSSSPCSNNPPFYFPTSNTNYLHNCTNNDISFTQRIQSSPSSFPLPKEELPLLNLSPARGEDLESSFSAMKVNKEKEKELSMSANNNSLDDETAVTVALHLGLPSTTTTTTSSADLTSNVYSDKEDKKDTVASEYSPTRINKGQYWIPTPAQILIGPTQFSCPLCFKTFNRYNNMQMHMWGHGSQYRKGPESLRGTQPTAMLKLPCYCCAPXCKNTIDHP

SEQ ID NO: 32940 - protein, 241 aa, Glycine max
  Clone ID: TF_GmC1688_1.pep
MEKDIIHLSPTWDGDNGNSTEKRLRLFGFELNPSKDGYAKESGEGDESVNSSNSVSSGGDKTVQEKPSAKDSDERKFECQYCYKEFANSQALGGHQNAHKKERMKKKRLQLQSINRYLQHPFQSKHGFAHPSDTPWFYDPSTYNNSEFTLSEEPQISFNSNVLDANFSCDQKSSWYSLASHPSNSQQDTCMFTFSNASNNSPFIFKPCHFPASNQSHKSKALDLQLGLNLQSNTRSSLRRM

SEQ ID NO: 32941 - protein, 309 aa, Glycine max
  unsure (1)..(309): unsure at all Xaa locations
  Clone ID: TF_GmC1730_1.pep
MEFWGAEVKVGESVKVDPAEFEACIHLSQAALGEAKKDKPNEPVVLYMKVGQQKFVLGTLSREKIPQISLELVLEKEFELSHNSKNASVHFCGYKAFYDAGDDSEEDEFTDSEEDVPLLKAENGKPETKAEELKVPESKKAVAKASASAKQVKIVEPKKDNEEDSDDDSDEXDDFGSSDEEMEDADSDSDDESDDKEDDDEETHPKNKKADLGKKRPNESASKTPVSSKKAKNATPEKTDGKKGGHTATPHPAKKGGKTPNSEAKAKTPNSEAKAKTPKSGGLSCKTCSKSFTNESGLQQHNKAKHGGQ

SEQ ID NO: 32942 - protein, 138 aa, Glycine max
  Clone ID: TF_GmC1730_3.pep
GSSYQHPPSLHQKIQNHHHQNHHQSGDEDDDEETPPKKVDLGKKRPNESASKTPVSSKKAKNATPEKTDGKKGGHTATPHPAKKGGKTPNSEAKAKTPNSEAKAKTPKSGGLSCKTCSKSFTNESGLQQHNKAKHGGQ

SEQ ID NO: 32943 - protein, 182 aa, Glycine max
  Clone ID: TF_GmC908_2.pep
MVAILKRQRETEAEESIIRLAESLMQLSRVQQKSKPLLKTFSPTEFECKTCNRKFPSFQALGGHRASHKKPKFEGEELKEEAKKGLSLGNKPKMHECSICGMEFSLGQALGGHMRKHRGATSENNNEAFSSSIKQAISKVPVLKRSNSKRVMCLEMDLNLTPLENDLKLLFGNKAPRVDLSL

SEQ ID NO: 32944 - protein, 451 aa, Glycine max
  Clone ID: TF_GmC168_2.pep
MLDNNNCSASNSGAPSSSDAAFALSENGVANNKRKRRPAGTPDPDAEVVSLSPTTLLESDRYVCEICNQGFQRDQNLQMHRRRHKVPWKLLKRETAQGGHQKKRVFVCPEPTCLHHDPCHALGDLVGIKKHFRRKHSNHKQWVCDKCSKGYAVQSDYKAHIKTCGTRGHSCDCGRVFSRVESFIEHQDACTVRQHRPELQALQPACSSRTASSASPSSEANFSIAPPLQGLPVLPKPAEQQQQPATTTVLLTSEIHGNKSTTSHNLELQLLPSSTNSQAKRNTKENYGLKLSIGSCSNDKGNSSEPPERACSEAHRSPPERNNNNNNNNVSDYSTLEVARLQEFAGEELKLAIAEKAYAEEARREAKRQIEIAELEFENAKRIRKQAQAELSRAEELRKQAIKKIGSTVMEIACHTCKQQFQSSTVGVPSSEETSIVMSYMSSATTEGEAE

SEQ ID NO: 32945 - protein, 292 aa, Glycine max
  Clone ID: TF_GmC910_1.pep
PPVKLHQGCLGHALSKIERPFVCAVDDCQASYRRKDHLTRHLLQHEGKIFKCPVENCNSEFSLQSNMKRHTEEIHDDSSTTTSSDKSHKQHMCPEIGCGKVFRYASQLQKHEDSHVNLESVDMVCLEPGCLKHFTNVQCLQAHVKSSHQYMTCDICGTKQLKKNIKRHLRSHEAEGSSSETFQCEFKGCSCTFSRKSNLDKHKKAVHFNVKPFACGFTDCGMRFAYKHVRDNHEKTAKHVFTLGDFEEADEEFRSRPRGGRKRTCPTVEMLIRKRVTPPSQLEHWLFMQDSE

SEQ ID NO: 32946 - protein, 681 aa, Glycine max
  Clone ID: TF_uC-gmronoir015a12_FLI.pep
MLAAAGINGGSGTTQQQQQQLFGQLLGSNPFSQGTTPSLMFNNSSAFGGINPTEFDGAAMLAKLSAEFAAVAQAQHGQSGAISATTVQSTGGPSTQQNGAMGRGHTPAPSNKPPPQKRQYSSTSKNFCDLCNKEVCNKYFLRTHMLKMHNIIIDENKQLIANIDTVDKERKGEVKFRCDICHTSMNTREELKLHKRESHGMHAGGGGSQSAPLGGARGVPKATSSSASQPTAVSMDTAETNQQQQQKRVALPSFAPAASNFNAIEHQTQQQQQQSTQRRTTSEGTEANDENNQPLGVHSPQQQQTREAAGAQQPSLAGANPMKQLLSIIGGDEALPPSLVGGARLLRTTGERNDFKKDTEEEHLGHRIADANNNATNCRFCGLCLEEEGQLQLHQLMEHPNEYMAELQPTMDLPHSASTEDKLINQVALQMAEANSHNHHHHHHQHTSAPTAISATTEDFGRVLRRFVLFGRLFRRSRHGPSASATENEERHSVARRKCRRRRRKRRRRGKAPMPTVQKNLQKCAKIGGAPAHGAPQFCRQNVTGEAIDHFAEKDCQTDEFVFMSQMQATVRKSRRMRRTRPFAHPLGEIEARGSGRRTTAGRGGGRRGESTASEEAEDGGGGRRGRSGGTTPSGRRSQRSGGKDEHRRRSGGRSKTAACTETNKGRHGGRRKAQPYERFD

SEQ ID NO: 32947 - protein, 233 aa, Glycine max
  Clone ID: TF_GmC21_2.pep
MALETLNSPTTTAPSFPFDDPTIPWAKRKRSKRCSRDHPSEEEYLALCLIMLARGGTTRRVSTPPPQPTPDPSTKLSYKCSVCNKSFPSYQALGGHKASHRKLAASGGEDQPTTTSSAASSANTASGGRTHECSICHKSFPTGQALGGHKRCHYEGNSNGNNNNSNSSVTAASEGVGSTHTVSHGHHRDFDLNIPAFPDFSTKVGEDEVESPHPVMKKPRPFVIPKIEIPQYQ

SEQ ID NO: 32948 - protein, 312 aa, Glycine max
  unsure (1)..(312): unsure at all Xaa locations
  Clone ID: TF_GmC2530_9.pep
MAAPFSAASLFAIREEDQNQMKQQQHSSTPSSSTTPAAPPQKKRRNQPGTPYPDAEVIALSPKTLMATNRFLCEVCNKGFQREQNLQLHRRGHNLPWKLKQXTNKEPKRKVYLCPEPTCVHHDPFRALGDLTGIKKHYYRKHGEKKGKCEKCSKKYAVQSDWKAHSKTCGTREYRCDCGTLFSRRDSFITHRAFCDALAQESARFPGGLNPLGTHLFGTNHTTSLSLSQVGNQLSQVQKQNQTATNYNSILRLGNNNVGAAATKFEHLIPPLNHSSFGHSPQSMPSSAFFMNDNTNQALFEEHQSQLQGLMQ

SEQ ID NO: 32949 - protein, 185 aa, Glycine max
  Clone ID: TF_GmC149295_1.pep
FITFHIVINSSYVSMKRQRDFKGFESIDLANCLMMLSHPQQNEKLLQKKIEAVEFECKTCNRKFSSFQALGGHRASHKRSKLEGDHELKAHAISLSLANKPKMHECSICGQEFSLGQALGGHMRRHRTTIHEDFSSIKQVITQMPVLKRSNSTRVVTCLDLNLTPLENDLKLLFGKMAPNAGAFA

SEQ ID NO: 32950 - protein, 207 aa, Glycine max
  Clone ID: TF_GmC475_1.pep
EKTKLARALLQSQQLSCSALFCYSNPLIKPTYVVAMKRGREESKLDMANCLMLLTKVGESETNYPISKGSDIGDFKCKTCNRRFSSFQALGGHRASHKKPKLMVTDLSCHQELPNPTMKQQPRMHPCPICGLEFAIGQALGGHMRKHRTAINDGLLCGKPSSSLSILKESSKDGDQKLNLRLDLNLTPLEEDDLKLNLRTPVLNCFI

SEQ ID NO: 32951 - protein, 783 aa, Glycine max
  unsure (1)..(783): unsure at all Xaa locations
  Clone ID: TF_GmC4501_1.pep
PRVRQEEAEAKMVAEDLGIDYMWKNIEYSHASKEDEEKIQSALDSEEAIPGNGDWAVKLGINLFYSANLSRSPLYSKQMPYNSVIYSAFGCSSPASSPVEPKVYQRRVNRQKKIVAGKWCGKVWMSNQVHPLLAKRDFEDVEDEKLLIGWILPDEKLERSEITLKSEATSRKSGKKRKMTAENGRFKKGSXLTKNVLSDNSTEDKHNLPPRSILRNKKVRYVERDRAALKGGYCPPYHRKPSNNQTNFSESDAVSDDSLDDDDHMQQRRNVIIEKAKFMDNDVVSNDRXDYDSDWQQREELSSKQVEDTERDAISEDSLDVGSLQLLRKNSRAKHAKNISQEDIISDDQMESPLQKRQRRIPKSRQGKYLTGKDIISDDQLEHKKKKQQRKNPKSRQAKYLNEEDIASDDQLEGHYRRYQRKNSRGRHAKCVAGEDGMPDDQLEDHCQKQQTNFSRKRQNKGIVREVKNEMCDDQLEDHFLKQHRRFPKSRQNKHTEKEVMDDLAENNSHLLHRTPKRKQAKCMEEDDMNSDDEMEDDQPLRRALRSKQAKPKTLLKQANSFQAKKQASRPIKQGSRLLVKSKAPQQIKQPAHLRNKQSNNTQEFSLYMEEEEDGGPSTRLRKRATKAQESEGKLKDKQTKRMKVKNAAAAKVSVGHAKMKDGEAEYQCDIDGCTMSFGSKQELMHHKRNICPVKGCGKKFFSHKYLVQHRRVHEDERPLKCPWKGCKMTFKWAWARTEHIRVHTGARPYVCAEPDCGQTFRFVSDFSRHKRKTGHSAKKNCQ

SEQ ID NO: 32952 - protein, 289 aa, Glycine max
  Clone ID: TF_GmC724_3.pep
GCGKTFIDAGALRKHSHIHRKWQYVCHYDGCGKKFLDSSKLKRHFLIHTGERDFVCPHEGCGKAFSLDFNLRSHMKTHSQENYHICPYPDCGKRYAHEYKLKNHIASHHEKNAPLDVAKYTTPPPEKQTKTSKPSGGAYGSASSDRPYACPYDGCEKAYIHEYKLRLHLKREHPGLMADENAEHAQANVGNEMDEASDHDAYVAKRSNGKIQKQSKPKPNLKLPPSKIAKRKVSTPTLTVNKNSWPVKDEPFDEEDSEETEEDRDNVEDGWRYAGGNNEDDDEETEYED

SEQ ID NO: 32953 - protein, 323 aa, Glycine max
  Clone ID: TF_GmC431_1.pep
MGLMECNVEDNKNLYLHAPTFIEWLKPCSSPNYSYLNSNTISYSSSSSPSSSSFSLTQNEFVQETIQFLPILSEKASKDEDQSFEVKEEKVEQVTVALHIGLPDSNKGHADEVDEKMIFHVKEEEESSKRSFHGCSFNNQERRFWIPTPAQILVGPMQFACSICSKTFNRYNNMQMHMWGHGSEFRKGPDSLKGTQPAAMLRLPCYCCAQGCKNNINHPRAKPLKDFRTLQTHYKRKHGTKPFMCRKCGKTFAVKGDWRTHEKNCGKLWYCTCGSDFKHKRSLKDHIRSFGKGHNPHPPFEAFEDEKECITGSDEDEVNAHHT

SEQ ID NO: 32954 - protein, 178 aa, Glycine max
  unsure (1)..(178): unsure at all Xaa locations
  Clone ID: TF_GmC222431_1.pep
KGQSWVPYPFSXILMVPTQFPCPVCCKPFNRSNNMQMHMWGHGSQYRKGPESLRGTQPTGMLRLPCYCCSPGCRNNIDHPRAKPLKDFRTLQTHYKRKHGIKPFMCRKCGKAFAVRGDWRTHEKNCGKLWYCICGSDFKHKRSLKDHIKAFGSGHAAYGIDGFEEEEEPASEVEQDND

SEQ ID NO: 32955 - protein, 179 aa, Glycine max
  Clone ID: TF_GmC908_1.pep
MVAILKRQGENESEETIIGLAKSLMQLSRVQQQSNKPLLKTFSPTEFECKTCNRKFSSFQALGGHRASHKKPKFEAEELKEEAKKTKPKMHECSICGMEFSLGQALGGHMRKHRGAISENDNNNEALSSIKQAIAKAPVLKRSNSKRVMCLEMDLNLTPLENDLKLLFGNKAPRVDLSL

SEQ ID NO: 32956 - protein, 383 aa, Glycine max
  Clone ID: TF_GmC47148_1.pep
MFPAVMSNSNSWSEEATVSCGTRITGLNHVVTTTISPQQPQKIKKKRNLPGNPDPDAEVIALSPKTLLATNRFVCEICNKGFQRDQNLQLHRRGHNLPWKLKQRSNKDVKKKAYVCPEPSCVHHNPSRALGDLTGIKKHYCRKHGEKKWKCEKCSKIYAVQSDWKAHSKTCGTREYRCDCGTLFSRKDSFITHRAFCDALAEESARLSANNLAAAAGATVTTTTTNPFQSLYLFQTQQQNFQNHQMTSFNQWDSSQENPNPSNNIATTSLHIEPESQSFHNPTLSSFLQQQQQGQQPNNNNRGMIASPFGNLHVAAAAPATSSYMSATALLSEGCNRWSRCHNRPSTCWATTAREGSRGSPPRRRRVRNRYSESTRPGGVGAR

SEQ ID NO: 32957 - protein, 233 aa, Glycine max
  Clone ID: TF_GmC444_5.pep
MALEALQSPRTATPSFSPFEETNLSYLETPWTKGKRSKRSRMEQQLQHSSCTEEEYLALCLIMLAHGGAGGVPAAKPAVSDNNSAPLPAAKLSYKCSVCNKAFSSYQALGGHKASHRKLGGEHHSTSSAVTTSSASNGGARTHECSICQKTFPTGQALGGHKRCHYEGGNSAVTASEGVGSTHTGSHRDFDLNLPAFPDFSTRFFVDDEVTSPHPSKKSRLNLTIPKIEIPQY

SEQ ID NO: 32958 - protein, 144 aa, Glycine max
  Clone ID: TF_GmC719_1.pep
MASCLMLLTKVSDTETPSRKRVLSGGDFKCKTCNRKFQSFQALGGHRASHKKLKLMASNLSCSTVTQKMHQCPICGIEFAIGQALGGHMRKHRASLNDGLITHDHVVPTSSGTKRLRLCLDLNLAPYENDLNLNLRTPTLNLFV

SEQ ID NO: 32959 - protein, 521 aa, Glycine max
  Clone ID: TF_GmC2175_1.pep
MDSNGSLRANTWARSSSLTSPASGLSSDPLSFPGFGLQHNQQKWDVPSNSDFGIRAEAPFKEFNQPSQTQSPLPCNSNNEIEIPGQENCHLSESSQTNTLQDWDPSVMLNNLSFLEEKIHQLQDLVHLIARQKGIGQPNELVTQEQQLVTTDLTSIIIQLISTAGSLLPSARHNLVNTSSLVGQIDQLRGTTIPPGTGASNGCIQPQNNGGKILSDQSMQTDLPNSGEMEQKYNMVEHDLKDEEDVEDGENLAPGSYEILQLEKEEILAPHTHFCTICGKGFKRDANLRMHMRGHGDEYKTPAALAKPHKESASPKPIKRYSCPYPGCKRNKDHKKFQPLKTILCVKNHYKRTHCDKSYTCSRCNTKKFSVMADLKTHEKHCGKDKWLCSCGTTFSRKDKLFGHIALFQGHAPAIPLDDTKGAGVAEAPIHDSKENNSKVQSMNFTFGSNPSNANEVPNAMDAKGDSDDPINYFSSLNFEANFGEFNEFTRPLFDDPEGSFSFVMPGSFKSGGESSSDNLL

SEQ ID NO: 32960 - protein, 509 aa, Glycine max
  Clone ID: TF_GmC558_1.pep
MDPKGSLCATRSSSLTSPGNGLQTNLSSDPPSFYGVRIESPFEEFIQPSPPTQSVLPGESNTDIDIPDQENCPLSDSSHTSKLQDWNPSAMLNNLSFLEVKIHQLRDLVHVIVSKKCQPFGQPHELVTQEQQLITADLTSIIVQLISTAGSLLPSVRHTLTNANPLVGQLDQLHGINLPFESEPSSGIRPQNNSGNKLFDQSIQNDLPNKLEMEQNYNMEEHEPKDEEDVDEGENLPPGSYEILQLEKEEILAPHTHFCTICGKGFKRDANLRMHMRGHGDKYKTPAALAKPHKESGSEPKLISRGIPAPMPAERNKDHKKFQPLKTILCVKNHYKRTHCDKSYTCSRCNTKKFSVMADLKTHEKHCGKDKWLCSCGTTFSRKDKLFGHIALFQGHTPAIPLDETKGMAEPPDIQNRESNNKVESINFCFGSNSSSENVVQNMMDMKGNNDDPMNYFSSLNFEGCNFGAFNEFSQPPFEDSDGCFSFPMSGSFNYAPKFGGGESSSDNL

SEQ ID NO: 32961 - protein, 409 aa, Glycine max
  Clone ID: TF_GmC135_3.pep
LDPEAEVVALSPKTLLATNRFICEICNKGFQRDQNLQLHRRGHNLPWKLKQRSSKDIIRKKVYVCPEPSCVHHEPSRALGDLTGIKKHFCRKHGEKKWKCDKCSKKYAVQSDWKAHSKTCGTREYRCDCGTLFSRRDSFITHRAFCDALAEESARSVTGIVANSTTQPTEAAGVVISSSSLHQDMIHASNNNFPLKKEQQGCIPHWLGQPSPSSASSSFLFSHQDHHLHENPNPRGGPTLLPPPYHQTAPHMSATALLQKAAQMGATMSKTGSMIRTHQQQAHVSANAALNLSSRDHQMNPTPHDLLPFGNNKAVDNGVGVSPSLLHHVINSFSSSPFEGTFEDTFGGGDAMTADEGGGGGAGGNNNEGLTRDFLGLRHLSHTDILNIAGVGNCMNSSQHNQTRNPWQG

SEQ ID NO: 32962 - protein, 224 aa, Glycine max
  unsure (1)..(224): unsure at all Xaa locations
  Clone ID: TF_GmC2530_8.pep
MTAASSSTPFLGIREESPQITTHHQPSTVSPTTAPQKKRRNQPGTPYPDAEVIKLSPKTLMATNRFICEVCNKGFQREQNLQLHRRGHNLPWKLKQKSTTKEPKRKVYLCPEPTCVHHDPSRALGDLTGIKKHYYRKHGEKKWKCEKCSKKYAVQSDWKAHSKTCGTREYRCDCGTLFSRRDSFITHRXAFCDALARVTSRERCIYISKGTRSNGVYVHQWWGD

SEQ ID NO: 32963 - protein, 315 aa, Glycine max
  Clone ID: TF_GmC57025_1.pep
MEGLDSNNSTHNSIAKGKRTKRMRLLSPCGVIVAAITTTTTVTSSTSSANSGASSTTTYESEEEDMANCLILLAQGGESRHHPRHDKQQVEDHGLENCDDGAIKTEEKGNSSNVNTTTAATTTAANNNTKVGFYIYECKTCNRTFPSFQALGGHRASHKKPKLAAEEKKQPLPPSPLPPPTPSQLQHMIVTNYDRFEEGSVKSGPPISLQLGNNGNNNKGKIHECSICGSEFTSGQALGGHMRRHRASTNANNVVDTTSCNTVITTTITAVPPRNILQLDLNLPAPEDDLREAKFQFTATSQVLVGTPALVDCHY

SEQ ID NO: 32964 - protein, 338 aa, Glycine max
  Clone ID: TF_GmC48528_1.pep
MSNSISDPTRIIHSQDPNTTADPQVPLRNLSQVRNRMDSLQHFLSQSINTNTPLTVDQIAMVSSQILSSIHQVIVNGAALVSYSQNSIAAGAPDPPPYPKKPKPEPSVADKAKQTLDSKLEPLEGDDSEIVELDAVEILAEHMHFCEICGKGFRRDANLRMHMRAHGEQFKTAEALAKPSEKASWLRATRFSCPFVGCNRNKLHRRFRPLKSVICVKNHFKRSHCPKMYTCERCRKKHFSVLSDLRSHLKHCGGEARWKCTCGTTFSRKDKLFGHIALFEGHAPALACDEEGKGKQMVEDDEDPMLMSESGFELDDCFLDQEFPEGFFDDFGSIDDYC

SEQ ID NO: 32965 - protein, 181 aa, Glycine max
  unsure (1)..(181): unsure at all Xaa locations
  Clone ID: TF_LIB4165-008-Q1-K1-F10.pep
RVRSNIDNFIRSPCEGLRPRAGKIATDKSGVEINQVDKENQVAKRARRSSEGLVPHKNKKXDVKKPHKCDLDGCQMSFKTKAELLLHKRNLCPHEGCGKKFSSHKYALLHQRVHDDERPLKCPWKGCSMSFKWAWARTEHIRVHTGEKPYHCKVEGCGLSFRFVSDFSRHRRKTXHHVKPA

SEQ ID NO: 32966 - protein, 164 aa, Glycine max
  Clone ID: TF_GmC793411_1.pep
MKREREVDSITMANYLMLLSRTTTNLNTSNNRVFECKTCNRRFASFQALGGHRASHKKPRLMGESDSQVLIHGSPPKPKTHDCSICGLEFAIGQALGGHMRRHRAAAAAASNGNMHTTINSWLSSGSSSGGSTVDNTLPPNMNHNPNVTDTKRILFPDLNLTPL

SEQ ID NO: 32967 - protein, 489 aa, Glycine max
  unsure (1)..(489): unsure at all Xaa locations
  Clone ID: TF_GmC282_3.pep
MPVDLDNVSTASGEASVSSSGNLTVPPKPTTKKKRNLPGMPDPDAEVIALSPKTLMATNRFVCEICNKGFQRDQNLQLHRRGHNLPWKLRQRSSKEVRKRVYVCPEPTCVHHDPSRALGDLTGIKKHFCRKHGEKKWKCDKCSKKYAVQSDWKAHSKICGTREYKCDCGTLFSRRDSFITHRXFCDALAEESARSQPQTVAKASSESDSKAVTGDSSPPVAVEAPPPLVPPVSSQSNSVVVPSSSLQTQKPELPENSPQIIEEPKVNTAMNGSCSSTSTSTTSSTSNSNSGASSSVFASLFASSSASATASLHSQTPAFTDLIRAMGHPDHPADLSRPSSSEPISLCLATNHGSSIFGTGRQERRQYAPPPQPAMSATALLQKAAQMGAAATNASFLRGLGIVSSSASTSSVQQDNLQWGHQPVEPESASVPAGLGLGLPCDSSSGLKELMMGTSXSMFGPKQTXLRFLGLGEWAAGGTPWVEGLSALI

SEQ ID NO: 32968 - protein, 158 aa, Glycine max
  Clone ID: TF_GmC427_1.pep
MNNNMLGMKRRRDDNEGSLDLAKCLMLFSCPIESNKTQQKSFGSVEFECKTCNRKFSSFQALGGHRASHKRQKLEGEELKEQAKSLSLWNKPKMHECSICGLEFSLGQALGGHMRKHRASLNEGFPIIPSIDQVIAKIPVLKRSNSTRVMCLDLELHL

SEQ ID NO: 32969 - protein, 510 aa, Glycine max
  Clone ID: TF_GmC23433_2.pep
MSNSNITSCDSWSFTTENNNNGEDAAATVKQQLEMLGQLYSPNSNTSTTTNNSNGGSNADSQPPAKKKRNLPGNPDPSAEVIALSPNTLVATNRFICEICNKGFQRDQNLQLHRRGHNLPWKLKLRTTTEVRKRVYVCPEPSCVHHNPARALGDLTGIKKHFSRKHGDKKWKCEKCSKKYAVQSDWKAHSKICGTKEYKCDCGTIFSRRDSFITHRAFCDALSEENNKFNEGQLPKMHGSNLQPPTIIPNLVASLPINGANNHKHPLSLPHDLMTTIPAKPFNNNMAAAFTRSLSSTSQLSSKSPNINMFEENGLLSPHMSATALLQKAAEMGATVNSNSNNNSMMMSGEKSFINVTSMAPPSYGIMNPNMHNGQQDLSQYNFIANGVVDGGSNGMGMGGLDMFNAILDQSKALSKIIEQNNRNSTYNGVLHAMNNGKSSDPIEGGGTKGSEAVNHVMTLDLLGIGGGGGDGNFYGGDQQSEIAAGDGIWGNWSNKNAGLESFSATNSTI

SEQ ID NO: 32970 - protein, 268 aa, Glycine max
  Clone ID: TF_GmC282_4.pep
MTVDLDNASTASGEAASVSSSGNQTKPAAPKKKRNLPGMPDPEAEVIALSPKTLLATNRFVCEICNKGFQRDQNLQLHRRGHNLPWKLRQRSSKEVRKRVYVCPEPTCVHHDPSRALGDLTGIKKHFCRKHGEKKWKCDKCSKKYAVQSDWKAHSKVCGTREYKCDCGTVFSRRDSFITHRAFCDALAEENARSHTVVKDISENDSKVLIGDSPPPQPVAATVAATTAAATTTTTTPRVRGRVANSVMSFGLHTHNLYLPDNNSPQVI

SEQ ID NO: 32971 - protein, 157 aa, Glycine max
  Clone ID: TF_jC-gmle01810062b01a1.pep
MAGIATETIDSFITAASPKSYDGSDLTPSQYSDAFANQPTDLTEDAFTPFESVDDLQDDRSIIKDIDLASLGHATHDVNESANSLSKKLFACEICGRSFQRIDHLARHKVNHDSVKPFNCIVCHRAFARKDVYRKHLQRHEADRRTRKPHTAPLHAH

SEQ ID NO: 32972 - protein, 483 aa, Glycine max
  Clone ID: TF_GmC168_1.pep
MLANNLSPSSVPTSEPFPCTENGTATNKRKRRPAGTPDPDAEVVSLSPKTLLESDRYVCEICNQGFQRDQNLQMHRRRHKVPWKLLKRETPVVRKRVFVCPEPTCLHHDPCHALGDLVGIKKHFRRKHSNHKQWVCERCSKGYAVQSDYKAHLKTCGTRGHSCDCGRVFSRVESFIEHQDACNMGRLRPHESRQEDKTTSTSGTRQSLLLERTCNEANQLHHAPNHLPWLQTTVPSFMNNPITAITTAETSSKSNNKLLHPNLDLQLSTPTNNNNSNTSNTNTSNIANPIDNAAISAKRDHYHENHSTHLQLSIGSSDMSEKNDQSNRNSSEKSSNNSNNINDQNNKQQSNNMALLRVQEQAREHLRIAMAEKAYAEEARKQAKRQIELAEKEFTNAKRIRQQAQAELDKAYALKEHAMKQINSTMLQITCHFCKQQFQARNATTTSPDDNSLVLSYVSSAITTEGGEVENDNIAKDHAKDNN

SEQ ID NO: 32973 - protein, 346 aa, Glycine max
  Clone ID: TF_GmC168_3.pep
MYADPDAEVVSLSPKTLLESDRYVCEICNQGFQRDQNLQMHRRRHKVPWKLLKRETTAVVKKRVFVCPEPSCLHHDPCHALGDLVGIKKHFRRKHNNHKQWVCERCSKGYAVQSDYKAHLKTCGTRGHSCDCGRVFSRVESFIEHQDACNVGRLGPETQSQAQAVQAAACLSRTASSETNFSTGSPWPQSGTIIIPNPTVTVVEPSSYTIVTAETNNKVHPNLELQLSNTTPTASSQEERVHQEQLRIAKAKKALAEEARKQAKRQIELAELEFTNAKRIRQEALAELDKAYAFKDHAIKHINSIMLQITCRACKHHFHSPTDDQIFSYITQARQVQKHRLKPIIN

SEQ ID NO: 32974 - protein, 351 aa, Glycine max
  unsure (1)..(351): unsure at all Xaa locations
  Clone ID: TF_GmC724_2.pep
MEIHYSNSYFERRPILKSKAAAVKWXKNEDTLKTLKEKVKEPSVPEPEPEPTTEVLFLCSYDGCGKTFIDAGALRKHSHIHGERQYVCHYDGCGKKFLDSSKLKRHFLIHTGERDFVCPHEGCGKAFSLDFNLRSHMKTHSQENYHICPYPDCGKRYAHEYKLKNHIASHHEKNASVDVTKYTTPPSEKQTKTSKPSGGAYGSASSDRPYACPYDGCEKAYIHEYKLRLHLKREHPGLMADENAEHAQANVDNEMDEASDHDAYVAKRSNGKIQKQSKPKPNLKLPPSKIAKRKLSTPSLTVNKNSWPVKDEPFDEEDSEETEEDRDNVEDGWRYAGGNNEDDDEETEYED

SEQ ID NO: 32975 - protein, 263 aa, Glycine max
  Clone ID: TF_GmC1644_2.pep
MDRHKCKLCSRSFSNGRALGGHMKAHLASLPLPLPPKLHSCFSSSDSEQEQSLRENPKKTLRILDPEDRESETESNKNPTRQRSKRNWKSTMPKLSLGHPEAEPLSSVSDTSPEEDLAMCLMMLSRDTWQEHKLANAGPPKTRCSSGSEIKLKSKVRSKHLCHACHKSFRSSRALGSHRTLCSPRLEAQNNSIISNNNIKVFECPFCYKLFGSGQALGGHKRSHLIPSSSSTVNHSVKLKQSFIDLNLPAPAEDDDLSVVSDA

SEQ ID NO: 32976 - protein, 368 aa, Glycine max
  Clone ID: TF_GmC1922_2.pep
MMSQEAISVPSNNLRDPSVQLHEPNSNSNSNPNNPNPNSLKRKRSLPGTPDPNAEVIALSPKSLMATNRFICEVCNKGFQRDQNLQLHRRGHNLPWKLRQRNKEEVVKKKVYVCPEKSCVHHDPCRALGDLTGIKKHSRRKHGEKKWKCEKCSKKYAVQSDWKAHNKICGTRQYKCDCGTIFSRKDSFVTHRAFCDAMAEQNARLPSVLSNLGSEILMNAAQAPRVMPQALQLHGFHSEFGGPGQEPYIGNFADVNHDEHKLRMPLWLDQTNNPLQLNHHHHHHPLSVSSNNSSSLFSPGTTLAEVNNMFGTSSSSQGQWLNYRYHPEASFTHANVSIPHGLKLEQEENKGNLSHSSPKSESADNNIV

SEQ ID NO: 32977 - protein, 371 aa, Glycine max
  Clone ID: TF_GmC724_1.pep
MEIHYSNSYFERRPILKSKAAAVKWVKEWVPQDLVTTGGKCMILKWVTEDTLKTLKEKVKEPSVPEPEPEPTTEVLFLCSYDGCGKTFIDAGALRKHSHIHGERQYVCHYDGCGKKFLDSSKLKRHFLIHTGERDFVCPHEGCGKAFSLDFNLRSHMKTHSQENYHICPYPDCGKRYAHEYKLKNHIASHHEKNASLDVTKYTTPPSEKQTKTSKPSGGAYGSASSDRRNVLRLMLRVKAYIHEYKLRLHLKREHPGLMADENAEHAQANVDNEMDEASDHDAYVAKRSNGKIQKQSKPKPNLKLPPSKIAKRKLSTPSLTVNKNSWPVKDEPFDEEDSEETEEDRDNVEDGWRYAGGNNEDDDEETEYED

SEQ ID NO: 32978 - protein, 260 aa, Glycine max
  Clone ID: TF_GmC50_4.pep
MALEALNSPTAATTPFRGYQEEEEDEEADLHLREPWAKRKRSKRPRFETEEEYLALCLIMLAQSGNTRNIHNNNTQLPSSSLSDKEASPPVKLTHRCTVCNKAFGSYQALGGHKASHRKASSESNPTASVSALANDSVSASTVGGGRMHECSICHKSFPTGQALGGHKRCHYDVRLREDTEGANGNNSSGATTSDGGAASSSHTLRGFDLNLPAPLTEFWSPMGFDFGKKKVGGEQEVESPLPVTAKRPRLFTGEDDETA

SEQ ID NO: 32979 - protein, 162 aa, Glycine max
  Clone ID: TF_jC-gmXLIB3563P002dh04a1.pep
RNIHNNNTQLPSSSLSDKEASPPVKLTHRCTVCNKAFGSYQALGGHKASHRKASSESNPTASVSALANDSVSASTVGGGRMHECSICHKSFPTGQALGGHKRCHYDGGNNHSNSNANGNNSSGATTSDGGAASSSHTLRGFDLNLPAPLTEFWSPMGFDFRK

SEQ ID NO: 32980 - protein, 242 aa, Glycine max
  Clone ID: TF_GmC7996_1.pep
HSFCLDMNQNQLQPLPLLSSFLGSSPEESLLQNQNENPNACHAQVEDVTVALHIGLPDHSSGSNSTNNHGFVNATTQVPNNYWIPTQEQILIGFSHFSCPVCHKTFNRYNNLQMHMWGHGSQYRRGPDSLKRTHPRPLLDLPCYCCARGCKNNIEHARAKPLKDFRTLQTHYKRKHGSKPFTCRKCGKPLAVKGDWRTHEKNCGKRWLCICGSDFKHKRSLKDHIKAFGFGHTPFSSFSDGM

SEQ ID NO: 32981 - protein, 298 aa, Glycine max
  Clone ID: TF_GmC1658_1.pep
MERYKCKLCSRTFSNGRALGGHMKAHLATLPLPPQNQQPPLSPSAAASFSSNSSSEQEQATHDEKSLIYGLRENPKKCFRLADPEFDTGSVVQDRESETESKNPTRRRSKRTRRPVNLEQKKPKLSFMESPEPVSSVSDTSPEEDVAMCLMMLSRDRWSKNNNINVVNVNDEDVVEEEEEEEEEEEEGGRSVLEIKLRRVRGKHQCQSCGKTFRSSRALGSHRSICEGSGNDSKIFQCPFCSKVFGSGQALGGHKRSHLMPSSSTTANNDSVRLKESFIDLNLPAPPEDDDLSVVSDA

SEQ ID NO: 32982 - protein, 253 aa, Glycine max
  Clone ID: TF_GmC153491_1.pep
MVSNSAFEDNGTDNNHNSNNKYTSIKAKFMDSELKSSPLKSWVNNNKNSEGEFSKSSNKRGKFECTTCKKIFHSYQALGGHRASHKRIKGCFASRNESSENSTELEAELSPDPTTESKLLKNEYVEEHEMVTNVTTATTTTQFDNEVETVRDSKKGKGHECPICHKVFPSGQALGGHKRSHHLAGGSESARNFQSQTIVLEEAAPEIRDFFDLNLPASTEEEGTGHGHAEHYRPWWVVGGNHKQEALVGLISN

SEQ ID NO: 32983 - protein, 348 aa, Glycine max
  Clone ID: TF_GmC296_1.pep
EAPEELSFGGSKDHTNIAKGKRTKRVRPQSPIPFSITANSSTGGEKEEDCYNVDDDNIIKNEDINNNNINNINSTPTTSAELQDITDEEEDMANCLILLAQGQSRESPKHAEEDAGMSYAKHNSRKFLEAATLGSSRAGYYVYECKTCNRTFPSFQALGGHRASHKKPKALMAIGQKKKQQHLLSSDEEEFQLKTNKSPFSIQLNTNGNLYSSSSNNNNKSKVHECSICGAEFTSGQALGGHMRRHRAPVGTTPTATILSFTPLALEPEEDHPRKKRNVLNLDLDLNLPAPEDDHRESKFAFASKQQQQQHGQKQPQQHHHPEQKQQQPQQQQTSLVFPVPALVDCHY

SEQ ID NO: 32984 - protein, 184 aa, Glycine max
  Clone ID: TF_uC-gmroLIB3258P126b02a1.pep
EYCGICRSKKTLITSHINLHHKEEYEKARAERDPEAEASKSNSCEECGATFKKHAYLLQHMQSHSLERPFVCAVDDCQASYRRKDHLTRHLLQHEGKIFKCPVENCNSEFSLQSNMKRHTEEIHDDSSTTTSSDKSHKQHMCPEIGCGKVFRYASQLQKHEDSHVNLESVDMVCLEPGCLKHFT

SEQ ID NO: 32985 - protein, 313 aa, Glycine max
  Clone ID: TF_GmC1072_1.pep
MLAQMDMEELVSCNNNDATNIAKGKRTKRRLRPLSPCAVVAATTITTTTTAITAITTVMTSSCSSASAGGGGSSSSTTFEEEEEDMANCLILLAQGRVGRDPPHHHKDLCGDVKTEKGSTKVDHLYVYECKTCSRTFPSFQALGGHRASHKKPKMEEKKLLSPPLLLPPLPASSSSLFNFEEAKQSHMKNIISPSVSLQLGCGINKVGLNFHGNKSKIHECSICGSEFTSGQALGGHMRRHRASNNNNNIVQTTTTTTTTSNGAVDVKPRNVLELDLNLPAPEDDLRDSKFQFPANPNSMMLSAAPALVGCHY

SEQ ID NO: 32986 - protein, 240 aa, Glycine max
  Clone ID: TF_GmC21_1.pep
MALEALNSPTTTAPSFPFDDPTIPWAKRKRSKRSRDHPSEEEYLALCLIMLARGGTTTVNNRHVSPPPPQPQPQPTPDPSTKLSYKCSVCDKSFPSYQALGGHKASHRKLAAAAEDQPPSTTTSSAAATSSASGGKAHECSICHKSFPTGQALGGHKRCHYEGNGNGNNNNSNSVVTVASEGVGSTHTVSHGHHRDFDLNIPAFPDFSTKVGEDEVESPHPVMKKPRLFVIPKIEIPQFQ

SEQ ID NO: 32987 - protein, 159 aa, Glycine max
  unsure (1)..(159): unsure at all Xaa locations
  Clone ID: TF_GmC427_2.pep
MLGMKRHRDNEGSESLDLAKCLVLFSCPIESNKAQQKGFGAVEFECKTCSRKFSSFQALGGHRASHKRQKLEGEELKEQAKTLSLWNKPKMHECSICGLEFSLGQALGGHMRKHRAALNEGFPIIPSIDQVIAKIPVLKRSNSTRVMCLDLXVTPVENE

SEQ ID NO: 32988 - protein, 144 aa, Glycine max
  Clone ID: TF_GmC39743_1.pep
MKRQRENEVTTLESWDMQICSTSITPDTSVSSSTISPEDVFECKTCNRKFNSFQALGGHRACHNKRVKMEGEEQQLKTRAKYLGLGKHSEPKMHNCSICGQGFSLGQALGGHMRRHRASTNDVFSSIKQVVAKVSVLKRSCNDK

SEQ ID NO: 32989 - protein, 265 aa, Glycine max
  Clone ID: TF_GmC1644_1.pep
MDRHKCKLCSRSFSNGRALGGHMKAHLATLPLPPKPHSYSSSSDSEQEQEQESLNYALRENPKKSFRVADPEDRESETESRNPTRQRSKRNRKSTMPKLTPPPHPEPEPLSSVSDTSPEEDVAMCLMMLSRDTWQQHKHANAATPKRRCSSGSEIKKNVRGNHLCHKCHKSFRSSRAFGSHRNVCCPREEGQNNYNNNRSTKVFECPFCYKVFGSGQALGGHKRSHLIPSSSSTVNDSVKLKHSFIDLNLPAPAEDDDLSVVSDA

SEQ ID NO: 32990 - protein, 467 aa, Glycine max
  Clone ID: TF_GmC282_1.pep
MTVDLDNASTASGEAASVSSSGNQTKPAAPKKKRNLPGMPDPEAEVIALSPKTLLATNRFVCEICNKGFQRDQNLQLHRRGHNLPWKLRQRSSKEVRKRVYVCPEPTCVHHDPSRALGDLTGIKKHFCRKHGEKKWKCDKCSKKYAVQSDWKAHSKVCGTREYKCDCGTVFSRRDSFITHRAFCDALAEENARSHTVVKDISENDSKVLIGDSPPPQPVAATVAATTAAATTTTTTTITSTTQANSVISSCSTSNGGATCNSNSSSSVFASLFASSTASVTLQSQTPAFSDLIRAMGPPEHPADQISGPSSEAISLCLSTTSASPIFATGGRQYASSSPHPAMSATALLQKAAQMGAAATNASLLRGLGIVSSSPLDSTSGSVAAAGLGLGLPCEDGGSGLKELMMGTSSMFGPKHTTLDFLGLGMAAGGTAGGGLSALITSIGGGLDVTAAFGNGDFSGKDIGSSS

SEQ ID NO: 32991 - protein, 511 aa, Glycine max
  unsure (1)..(511): unsure at all Xaa locations
  Clone ID: TF_GmC282_2.pep
MPVDLDNASTASGEAASVSSSGHQTKPAVPKKKRNLPGMPDPEAEVIALSPTALLATNRFVCEICNKGFQRDQNLQLHRRGHNLPWKLRQRSSKEVRKRVYVCPEPTCVHHDPARALGDLTGIKKHFCRKHGEKKWKCDKCSKKYAVQSDWKAHSKVCGTREYKCDCGTVFSRRDSFITHRAFCDVLAEENVRSHAVVKDNSENDSKVLTLTGDSPPLQPVSATVATTTTQTNSAMSCGLQTQNLELPETNPPQVIEEEPQGATAVSGSCGSNSTCSTSNGGATSNSNSSSSVFAGLFASSTASGSLHXQTPAFSDLIRAMGPPEHPADLISAPSSSEAISLCLSTTSASPIFATVGQQYVSSPPQPAMSATALLQKAAQMGAAVTNASLLRGFGIVSSSSLASTSSGQQNGLQWGQQQLESESGSVPAAGLGLGLPCEDGGSGLKELMMGTPSMFGPKHTTLDFLGLGMAAGGTAGGGLSALITSIGGGLDVTAAFGNGDFSGKDIGGSS

SEQ ID NO: 32992 - protein, 537 aa, Glycine max
  unsure (1)..(537): unsure at all Xaa locations
  Clone ID: TF_GmC1035_1.pep
MYEKGQSDEKGHFSSIFMGSDKILPSHVVANGHAPLDSGHARLKELGYKQELKRDLSVISNFAFSFSIISVLTGVTTLYNTGLNYGGPVSLVYGWFLASAFTMLVAFSMAEICSSYPTSGGLYYWSAKLAGPRWAPFASWITGWFNIVGQWAVTTSVDYSLAQLIQVIILLSTGGKNGGGYEASKYVVIAFHGGILFLHGIINSLPISLLSFLGQLAAIWNVIGVFVLMIVIPSVATERASAKFVFTHFNTENGEGINSKPYIFLLGLLMSQYTLTGFDASAHMTDDTKDADRNGPKGIISSVGISIVVGWGXILGITFAVTDILYLLSEDNDAGGYAIAQVFXQAFKKRSVHGSGDIINXVIVAVVIFFCGMSYVNRNSNMASAPNRDGCMPLSSLWHKVNKQEVPIYAVWLSVFISFCMALTSLGSIVAFEAMVSIATIGLYIAYAFPIFLRVTLARKHFVSGPFNLGRYGVVVGWVAVLWVLTISVLFSLPVSYPITIKTLNYTPVAVGCLLILVVSYWLISGRRWFKGPITNI

SEQ ID NO: 32993 - protein, 223 aa, Glycine max
  Clone ID: TF_GmC45046_1.pep
ANFNFIFKAVFESVFNGYSGIPRSGKALCCLGLQAHRFLALHLRLLRPGACRVILVFSCTIKCRDCTVEHCLKHRSGPDHKCPGPTKVESSFSFMNLLNGSKKQESKPKSSATSWSTSFLNAASNVRASAEAGVSKLSSWQTARGGVGQSHSSGQVEQCPQCGAKFSSVTTLVDHVQKVHERSRNRSGAKVTIDVCPKCSRGFRDPVALVEHVERDHGGSSRS

SEQ ID NO: 32994 - protein, 147 aa, Glycine max
  Clone ID: TF_GmC166190_1.pep
MAVEESEPVIGELEREENLIAAVRHIVKALGPNKTLTSDAKKILADLGTRLSSMSVPSEKEEGKQGQGKDDGDNHDALVLEQDRVDEDEKEADTAKAAWVCRVCLSSEVDITIVPCGHVLCRRCFSAVSRCPFCRLQVTKAIRIFRP

SEQ ID NO: 32995 - protein, 229 aa, Glycine max
  Clone ID: TF_GmC76336_1.pep
MLSFRLFVRALGYPRDKDGGCFQMRISYSPAAPLFLFLVQWTDYRLAGALGLLRILIYVTYGNGKNTMSIYERKASIRQFYSIIFPALLQLEKGITDLEERKQKEVYALRYQRKSEFNERRQSEIDIEREEECGVCLEVKAKVVLPNCCHYMCLKCYRDWCQRSQSCPFCRDSLKRTNSGDLWIYTDTSDIVDVGTIFKENCKMLFLYIEKLPLIVPDPRYVFYDPLLR

SEQ ID NO: 32996 - protein, 90 aa, Glycine max
  Clone ID: TF_GmC110067_1.pep
MQVETNRLTYGTNAKDDEEEDSGASSSSSEELYDEKLCCICYDEQRSSFFVPCGHCATCYDCAQRILDEESIVCPICRRLIHKVRRLYHN

SEQ ID NO: 32997 - protein, 152 aa, Glycine max
  Clone ID: TF_GmC1475_1.pep
MGLSSLPAPSEGVLCVLLVNTALSISIFKGIVRTILQIVGIRVSSLSPSPDISRNPPEPLEFNLSPSEGFIEEFRSRTPTLRFGSMCGSKQPQHECCCVCLTKFEPESEINCLSCGHIFHKVCMEKWLDYWNITCPLCRTSLMPEDDASCFW

SEQ ID NO: 32998 - protein, 731 aa, Glycine max
  unsure (1)..(731): unsure at all Xaa locations
  Clone ID: TF_GmC698_1.pep
MGSKWKKAKVALGLNLCMFVPRTLDDDSPPHTVVSERLSDATLLSPANWSTSSSRPTTPVSSFHGLKLSKSSSKSSKQTCSICLTKMKQGSGHAIFTAECSHSFHFQCIASNVKHGNQICPVCRAKWKEIPLSGPSLDPIQGRVSPSPVNWPQNDALMAVVHRVPLPLPHPHRDLNRRHVVPLYQASEPGIFDDDESLNHQHAFSERSTCNKSTEDTDAARAMEIKTFPEVSAAPGSKTYSNFTVLVHLKATAAAAAAAAKRQNLSRNQTNLAQISQTPRAPVDLVTVLDVSGSMAGTKLALLKRAMGFVIQNLGSNDRLSVIAFSSTARRLFPLCRMTDSGRQKALQAVNSLVANGGTNIAEGLRKCAKIMEDRKEKNPVASIILLSDGQDNYTVNGSGTSQPQPNYQFLLPTSISGGDNSGFQIPVHAFGFGADHDASLMHSISETSGGTFSFIETEAVLQDAFAQCIGGLLSVVVQELQVGIECTHPNLNLVSLKAGSYPSHLMADGCKGLIDVGDLYADEERDFLVSVNVPATSGNETSLIKVKNVYRDPCTQETATLESEGVKIERTENVGQVVMSLEVDRQRSRLQAAEAMAQASSAAEQGDLSRAVLILENCRKMLSETVSAKSHDRLCVALDXELKEMQERMASRHVYEASGRAYILSGLSSHSWQRATARGDSTDRSSLVQAYQTPSMAEMLTRSQAMLLGSPSGQRLLQPLVSYRPQPSPR

SEQ ID NO: 32999 - protein, 244 aa, Glycine max
  Clone ID: TF_GmC166190_2.pep
MVGKEILPQDARLVQFHPLRPFYSGEIVAWRSQHGEKLKYGKVSEDVRPSAGQALYRLKIEVSPGDTQSFLSSHVFSFKSVSASSPLKESLVHESPVLGSNRPHVDFPESSGRGESYSQVQPVRDQSGKVSAAELVQAVNEILSAAGIKMDVEKQALLQRTVNLQENLKESQAALVLEQERVQKATKEADTAKAAWICRVCLSSEVDITIVPCGHVLCRRCSSAVSRCPFCRLQVTKAIRIFRP

SEQ ID NO: 33000 - protein, 208 aa, Glycine max
  Clone ID: TF_GmC2979_142.pep
MGLGNDDDDGDTLKSFGSVCCSICLEAVTDNGDRSWAKLQCGHQFHLDCIGSAFNIKGAMQCPNCRKVEKGQWLYANGCRSYPEFSMDEWTHDEDLYDLSYSEMSFGVHWCPFGNLTRLPSSFEEGDFSSTAYHDVLGQHAIFAEHTAVSSASHPCPYIAYFGPIHPSTFNSGGTVSEASNFNHWNGPPVPGDMPTSYTFPAVDLQLY

SEQ ID NO: 33001 - protein, 417 aa, Glycine max
  Clone ID: TF_GmC2979_186.pep
MGLGNDDDDGDTHKSFGSVPCSICLEAVTDNGDRSWAKLQCGHQFHLDCIGSAFNIKGAMQCPNCRKIEKGQWLYANGCRSYPEFSMDEWTHDEDLYDVSYSEMSFGVHWCPFGNLTRLPSSFEEGDFSSIAYHDVLGQHAIFAEHTAVSSASHPCPYIAYFGPIHPSTSNSGLTVSEASNFNHWNGPPVPGDMPTSYTFPAVDLHYHSWEHNSSHFSSANSRLGTSEQTSVSPGSQRPARGGSDVPRSGSFMHPFLVGHSSAARAGNSVASSMIPPYPGSNARARDRVQALQAYYQPQQPHNSTTIRTPVASSTRRSSSHSGPVQLAPVASPPDQSAGFVYIPSGSSGRNFQEETHLPSRFHAWEREHLPSLALNNVGRESSWRAYHQTASVSDPSIRSSSFRLRHESDRMPSQNR

SEQ ID NO: 33002 - protein, 452 aa, Glycine max
  Clone ID: TF_GmC9820_1.pep
MSNRVCKFYARGACLKGDQCDFAHEKKDDICSYYKKGSCAYGSRCRYKHVKASQASSSANGRHSPVLDPVVNHTIKGTSSWVPKAVKSSSSDKRARSSQQKNLPSLENDVGQSSTSSVIPSEHLFCAFAAANCPLEDKCSRIHGNQCLYCRKFCLHPTDRKEKENHLRTCEKKEKYLQALKDSQEVECNVCLERVLSKPKPADCRFGLLPECDHAFCLSCIRNWRNSAPTSGMDISNAGTANTVRTCPVCRKLSYFVIPSGIWYSTKEEKQEIIDNYKANCKLIDCKHFNFGNGNCPFGASCFYKHTVKPGSYTWIHHRPPPQRRQNHFDVHDMLNMLQDVDLTSAEYFSIMRDSDLYDDMDPFEMMVSDRLAGDSGPCLGPFDSDEEDLDIFQMAALSEVLASGVDDFGPEDFGDEDFNPMEAALLSMMMHSNMEDEDDDDDEEEYSDEDY

SEQ ID NO: 33003 - protein, 154 aa, Glycine max
  Clone ID: TF_GmC181123_1.pep
KIGLTVVFLAFDVFFIIFCMGMACIVFIALFCIIPIIALAYAMRIREGASEEDIRSLPMYRFSLSNSLVMVDDNKKQLVKVRVDSCNGSHMSELSLHPDDSECCICLCPYVEGEELYRLPCTHHFHCGCISRWLRTKATCPLCKFNILRGDTLV

SEQ ID NO: 33004 - protein, 226 aa, Glycine max
  unsure (1)..(226): unsure at all Xaa locations
  Clone ID: TF_GmC225551_1.pep
MSNQVVKVRRDTIAACMTCPLCGKLFREATTISECLHTFCRKCIYDKITDEEIECCPICNIDLGCVPLEKLRPDHSLQDVRAKVFPLKGRKVKAPEVVTSVPLPARRKERSLSSFVVSTPRVSTQAAMTGRRTKPTRKASGLRSTSFSIEKPIKKEEDLLEDRPDSSSSPDTSYKFAQNSGQSISPCEGSQSIPYKGSENGAEPWDAKLDLWKPXNFLIEVASRSK

SEQ ID NO: 33005 - protein, 707 aa, Glycine max
  Clone ID: TF_GmC842_1.pep
MGSKWRKVKLAIGINMCVQVPKTVEHSSSSISSATPFSDRLSPSGDASGHCSVSSITSSASGLRLSRSKSNCSKGTCAICLNSMKAGQGHAIFTAECSHSFHFQCITSNVKHGNRICPVCRAKWKEVPFQSRSSKVSHGINRVNSPRNDSWTTLLGRVPTQQASTAPQLASPNNVAEPAIYDDDDEVLDQQTSVTEDMDEAVHNLVNTMEIRTYPEVSAIAKSASHDNFAVLIHLKAPPHSGRLSNNTESSAQNSRAPIDLVTVLDVSGSMSGTKIALLKRAMGFVIQNLSSSDRLSVITFSCTARRIFPLRRMTDAGKQEALQAVNSLVPNGVTNIVEGLRKGAKVFVDRKWKNPVGSIILLSDGQDSSINSSRINVVNDYRSLVPCSIHRNNGMGLHIPVHAFGFGVDHDATAMHSISEISGGTFSFIEDEDVIQDAFAQCIGGLLSVVVQQLHVEVQCVHRCLQLGSVKAGSYQTSLIDSGKMASIKVGDLYAEEEKDFLVTVNVPVDKSSDEMSLMIVRGIYRDPITKEMVGLGVNSEVKIQRPNVARDVVMSIEVDKQRNRLRATEAMAEARVKAERGDLSAAVSVLERCQQALSETISAKAGDELCISLAAEMKEMQDRMVNQRVYEQSGRAYVLSGLCAHSWQRATARGDSTDSTSFVNAYRTPSMVDMVSRSQTMLLRPPQSANAVKPARSYSDRQRRK

SEQ ID NO: 33006 - protein, 644 aa, Glycine max
  Clone ID: TF_GmC504_1.pep
FGSRGTCAICLYTMKPGQGHAIFTAECSHSFHFHCITSNVKHGNQICPVCRAKWKEVPFQSPASNMPYDRLNQVSPREEGWATVLRRLPSPQGDAARQISSLYHVTEPAIFDDDEALDQQTSVTHPKNEIDNDVINTVEIKTYPEVSSVPKSASRDAFAVLIHLKAPHSGRKQNIDANSTESSPLVENSRASVDLVTVLDVSGSMAGTKLALLKRAMGFVIQNLGPSDRLSVIAFSSTARRIFPLRQMTDTGRQQALQAVNSLVSNGGTNIAEGLRKGTKVFSDRRWKNSVSSIILLSDGQDTYTVNSRPNVGTDYLSLVPNSIHRNNGTGMQIPVHAFGFGSDHDATLMHSISEISGGTFSFIEAEDVIQDAFAQCIGGLLSVVVQELQVQVRCVHPQLQLSSVKAGSYQTSLMGNARLATISVGDLYAEEERDFLVTVNVPVDQSSDETSLLTVRCLYRDPITKEMVAGSRNSEVRILRSDVGGGELVVSIEVDRQRNRLRAAEAMAEARVAAERGDLSTAVSVLDSCHTALSETVSAKAGDRLCVALSAELKEMQERMANQRVYEQSGRAYVLSGLSSHSWQRATARGDSTDSTSLVQAYQTPSMVDMVTRSQTMVFGAPVPQNKRVLRPAKSFPERQRRQ

SEQ ID NO: 33007 - protein, 196 aa, Glycine max
  unsure (1)..(196): unsure at all Xaa locations
  Clone ID: TF_GmC504_2.pep
MGSKWRKLKLALGLDSCVHIPRAFDDSSAAAARFSGGISPTVVSPAGDTSGYRPSTPTPSSSGLWLPKSGTKSPKGTCAICLYTMKPGQGHAIFTAECSHSFHFHCITSNVKHGNQICPVCRAKWKEVPFQNPASNMPHDQLNQVSPREEGWTTVLRRLPSPQVMXSADSSLYHVTEPAIFDDDEALDQQTSVAHP

SEQ ID NO: 33008 - protein, 520 aa, Glycine max
  Clone ID: TF_GmC23859_1.pep
RFGSSDPFPIKIAENALLSFLLLLKHCKLQQDEERDNLNTFKSEKLDSVKDRILEGVLRLLFCTGVSEAIASACYKEAASVIASSRVEYTHFWDLVASGVVNSSSQARDKAVKSVEFWGLRKGSISSLYAILFTSKPIPSLQFAAYFVLSNEPVLSIAVLEDNACNSNIYAASEEDISRLDLPIEEKVHLKEEISFMVERAPYEVLDMDLLADQRVNLFLAWSLLISHLQSLPSSSSQRERLIQYIQDSATPVILDCLFQHIPVEISTVQSLKKKDAELSGGLSEASSAATRATTTGSLLFSVESLWPVELGKISSLAGAIYGLMLQVLPAYVRGWVSDLRDRNTSAVIESFTRTCCSPPLIANELSQIKKSDFRDENFSVSVSKSANEIVATYTKDETGMDLVIRLPASYPLRPVDVDCTRSLGISETKQRKWLMSMMLFVRNQNGALAEAIGIWKRNFDKEFEGVEECPICYSVIHTTNHGLPRLACKTCKHKFHSACLYKWFSTSHKSSCPLCQSPF

SEQ ID NO: 33009 - protein, 395 aa, Glycine max
  Clone ID: TF_GmC61_1.pep
MVSPSQVVKVKRNTLRPCMTCPLCHKFFKDATTISLCLHTFCRKCIYEKLSDEEMDCCPVCHIDLGCLPVEKLRPDHNLHDIRAKIFPFKRKKIKAQEVLSSISLPAKRKERSLSSLVVSAPKVSMQPGFTGKRTKSSTRKAAALRGCSFLLDESIKKEQTNGDDNMDSPMPEHSKKHKPHEDTENSVQHTEGKVDLWTPLNCLVEAANRTKSSRSNSQATPLAKLESPTTPHGGQDASETTTKTDLPASAQSELNIPKSKNKDTGLKPIFGDDKDANSLPLGPVKRRRLRPAGQKRVAASEMSASSPAPLDATGGKCNRKNSPIWFSLVASEDQKGDFPLPQISACYLRIKDGTVPVSFIQKYLMKKLNLASEAEEVKQHIASLVDIVWGLRLS

SEQ ID NO: 33010 - protein, 433 aa, Glycine max
  unsure (1)..(433): unsure at all Xaa locations
  Clone ID: TF_LIB3109-041-F10_FLI.pep
MVSPSQVVKVKRNTLRPCMTCPLCHKFFKDATTISLCLHTFCRKCIYEKLSDEEMDCCPVCHIDLGCLPVEKLRPDHNLHDIRAKIFPFKRKKIKAQEVLSSISLPAKRKERSLSSLVVSAPKVSMQPGFTGKRTKNSTRKAAALRGCSFLLDESIKKEQTNGDDNMDSPMPEHSKKHKPHEDTENSVQHTEGKVDLWTPLNCLVEAANRTKSSRSNSQATPLAKLESPTTPHGGQDASETTTKTDLPASAQSELNIPKSKNKDTGLKPIFGDDKDANSLPLGPVKRRRLRPAGQKRVAASEMSASSPAPLDATGGKCNRKNSPIWFSLVASEDQKGDFPLPQISACYLRIKDGTVPVSFIQKYLMKKLNLASEAEVEIMCRGQPVLPSLQLHNLVDLWFXTASTSKKIPASVGSSAKDFVMVLSYCRKALPP

SEQ ID NO: 33011 - protein, 358 aa, Glycine max
  Clone ID: TF_GmC5904_1.pep
SLSPQAPSLPSFISQPALSFLRALFGSPSVSASVRPSLQIDRPPDGAPGATAIPCCTVDAKSAVDGTWKTLRPGVLVSRESGDKGVILQRTQTCIYNDWKGLLGWTSDLRAICARSWRQQESTSLRKVPFLLTDVGRRPNAEYVVVNMDGSRHPLPLTTVYHKLQPITASPYTFLQALFGHEYPVGLLDEEKILPLGKDITAVGLCSLKNGIAEIKSCKYLPYFLSDLSKDQMIVDLSIKTKILFWGGIALGSMSVGVLGYAVLRNWIKWKRWKVQRQLQQQRQAVSDAEPQVDDEIEDVPDGQLCVICLMRRRRSVFIPCGHLVCCQGCAISVEREVAPKCPVCRQEIRDSVRTYES

SEQ ID NO: 33012 - protein, 150 aa, Glycine max
  unsure (1)..(150): unsure at all Xaa locations
  Clone ID: TF_GmC5904_3.pep
FKKGMLEIKSCKYLPYFLSXLSKDQMIXSFHQNKNTVWGGIALGSMSVGVLGYAVVRNWNKWKQWKQQRQLQQQRQAVSDVEPQMDDEIEDAPDGQLCVICLMRRRRSVFIPCGHLVCCQGCAISVEREVAPKCPVCRQEIRDSVRIYES

SEQ ID NO: 33013 - protein, 101 aa, Glycine max
  Clone ID: TF_GmC1470_2.pep
SRKGLGGFVPPPMATTRFGNFALSAAFGGFIPSLFNFQMHGFHDAAMYGGGAGFPHGFANTFHGVHAHGFPLRTHQGQQDYYLKKLLLFVVFCVVLAFKWQ

SEQ ID NO: 33014 - protein, 112 aa, Glycine max
  Clone ID: TF_GmC27292_3.pep
MNMTPVCPFVKAARPDDNNASKKSGENSMKHQAESESKVKKEVNDSASTSPKCPFGYDSQSFKIGPLSCTVCQALLFDTSKCVPCSHVFCKACISRFKDCPLCGADIVKIEP

SEQ ID NO: 33015 - protein, 368 aa, Glycine max
  unsure (1)..(368): unsure at all Xaa locations
  Clone ID: TF_GmC27292_1.pep
MNMTPVCPFVKASRPDDNNASKKSGENSMKHQVESESKGKKEVNDSASTSPKCPFGYDSHSFKIGPLSCTVCQALLFDTSKCVPCSHVFCKACILRFKDCPLCGADIVKIEPDANLQGVVDHFIEGHARIKRSVSSDKGEEATESKKVIYEDVSLERGSFLVQQAMRAFRAQNLESAKSRLNLCAEDIRDQLEKVGNTSELCSQLGAVLGMLGDCCRAMGDASSAVAYFEESVQFLSKFPKDDLEITHTLSVSLNKXIGDLKYYDGDLQAARSYYFKSLNVRRDVVKHNSNVPSQVLDVAVSLAKVADVDRNLGDEKLATDGFQEAIDLLESLTLKSEASGLEQRRQSVLDFLRSQLPDKQEQAEAPV

SEQ ID NO: 33016 - protein, 431 aa, Glycine max
  unsure (1)..(431): unsure at all Xaa locations
  Clone ID: TF_GmC122273_1.pep
MGNEESTHDSHDDFFRQPRSHDGSSPNTSHQYHQPPSYDGSSANTSHQYHQPSSYAGSSVNTRHQYKQRPTYIADSFSSLDQXYCTQVVSALREAGLESSNLIIGIDFTKSNEWTGKHSFNHKSLHFTGNTPNPYEQAISIIGRTLSSFDEDNLIPCFGFGDASTHDQYVFSCYPDECYCHGVEQVLARYREFVPRLLIXGPTSFAPVIDAAVGIVERSNGQYHVLVIIADGQVTRNSDTPHGKFSPQEQATINSIIAASHYPLSIILVGVGDGPWDEMQHFDDNITQRLFDNFQFVNFTKITSENKDASKKEAAFALAALMEIPIQYRITQNLQIANENPTSHQRKRPLPPPKEVIDRDNAVLAVPHVPNFESVEPSAPAAVESVCPICLTNPKDMAFGCGHTTCKECGVTLSSCPMCRQEITTRLRLYT

SEQ ID NO: 33017 - protein, 320 aa, Glycine max
  unsure (1)..(320): unsure at all Xaa locations
  Clone ID: TF_GmC83664_1.pep
MKVSILNFGSSTNQFHDHNKHACNEVTNIINPVNNEGKYSQLCDKSGRYDRLLKLSQDDLETVIRRVSRDSCLDPQKKSYIIQNLLMSRWIIRQQISSTEANIKNDELEFPGKHPSYRDPHKLIXSCNHYKRNCKLFAPXCNQLHTYIHMANEXSDHSVDRKSITXMMCMKCLVIQPISATCSTISCNLSMAKYYLSRCKLFDDEREKHLEDNCPICHEYIFTSCSPVKALPCGHVMHSTCFQEYTCFNYTCPICSKSLGDMQVYFRMLDALLAEERISDEISSQTQVLLCNDCEKKGETPFHWLYHKCPSCGSYNTRVL

SEQ ID NO: 33018 - protein, 409 aa, Glycine max
  Clone ID: TF_GmC7458_1.pep
MMTMKRLVRVNRDAIAACMTCPLCKKFLKEATAISLCLHTFCRKCIYDKITDEELENCPVCNIDLGIVPLEKMRPDNILQDLRNKIFPFKKRKEKAPVSVSSVLLPARRKERSLSSLVVSTPRVCTQSTMTGRRTKPARKASGLQGSSLSIEKFIKKEEELLSFIQNLLMKKLGLNSEDEVEIKCMGHPVLPSLQVQNLVDSWLDMAASGHRIPATMGSSGKDFVMILTYVLKAKIKEKKRKAKVEEEKISTDHASSDTSKPNKLRRVRQKKEPVFGESRISPQAVLDATDRNLLWNDSIWFSLAASENQEGDAPLPQIPSNYVRIKNGSIPVSFIQKLLMKKLGLKSEDEVEIKCMGHPVLPSLQVQNLVDLWGVDTASLGHRISATIGSSGKDFVMILTYGRKVLHP

SEQ ID NO: 33019 - protein, 171 aa, Glycine max
  Clone ID: TF_GmC122273_3.pep
HYPLSIILVGVGDGPWDEMKYFDDNITERLFDNFQFVNFTKIMSENTEASKKEATFALAALMEIPLQYRAAQNIQLNDRESVLHQHKRPLPPPNEVIHHDNARMAIPHMPNLESAESTAPAAAEPVCPICLTNPKDMAFGCGHTTCKECGSTLSSCPMCRHQITTRLRLYT

SEQ ID NO: 33020 - protein, 222 aa, Glycine max
  Clone ID: TF_GmC2979_76.pep
KQQLTWFSNACKGIPQVSPAFLQNNVPTGPPTALPVAEDTELAMAISASLQSAMQERPPFSDTQPSFEASSSSSAVNTGNHGFLGTPNPNTSDSELVQEANPDGNTQHLQSHVNASALDLNPSAPPIANEILADGPIQYPSIDLSPVDMASPDAEKLPKGEKNAGGSGSSCVICLDAPAEGACIPCGHVAGCMSCLNEVKSKKWGCPVCRAKIDQVIKLYHV

SEQ ID NO: 33021 - protein, 72 aa, Glycine max
  Clone ID: TF_GmC1254_4.pep
NNGLCIKISAQFVSKKLWFDTKWHYPQRFLPLNWCIVFHMQYKQSSLHILKLLASLARSRQYYTCKFYIMIS

SEQ ID NO: 33022 - protein, 46 aa, Glycine max
  Clone ID: TF_GmC761_3.pep
CTQDDESLTVLSCKHLYHPECINNWLKINKVCPVCSTEVSASGSNL

SEQ ID NO: 33023 - protein, 49 aa, Glycine max
  Clone ID: TF_jC-gmro02910041024d1.pep
YDDGVELRELPCGHHFHCVCVDKWLYINATCPLCKYNILKSNTLSQEEV

SEQ ID NO: 33024 - protein, 214 aa, Glycine max
  unsure (1)..(214): unsure at all Xaa locations
  Clone ID: TF_LIB4199-002-Q1-K1-E5.pep
SNLAKTPSLASFPFTTISFNVVILRVFLCSTLRCEHYKRRCKIRAPCCNQIFPCRHCHNDAANSSSNPADRHELVRRDVKQVICSVCDTEQEVAKVCSSCGVNMGEYYCEICKFYDDDTDKGQFHCDECGICRXCYSVSVQNNHSCVENSMKSFCPICLEYQFDSIKGSTILKCGHTMHMECYREMATQNQSRXPICSETIGNDVNWGILDREI

SEQ ID NO: 33025 - protein, 588 aa, Glycine max
  Clone ID: TF_GmC6407_1.pep
PRFFHNSNPSSPKSPSSFSLLKSTLRLSKSRCGICMQSARSGQGTAIFTAECSHTFHFPCIVKKHPIVTCPVCNTSWKELPVLSINNNNNDKSDKRGFKVYNDDEPLMSPTSLSRFNPIPESENEDEEQEQDNINTEFKGFHVNPLPNLHSTTVIRRNLQLSLLPEAAIVAANRNYESYVVVLKLKPPHVTKTSRRAPIDLIAVLDVGGAMSGSKLRLMKSSMRQVISSLRPTDRLSIVAFSAGSKRLLPLRRMTGGGQRSARRIVDALAAIDQTREGTPVKNDAVKKAAKVLEDRREKNAVASIVVLSDLNDSRAGNNMHKPSLVSTTRLAHLEVPVHAVRLGECSHALSDDALANFVGGLLNVVAQDVRIQLEVVSRSRAVEIAGVYSLSGRPVSLGSSDWIRLGDLYAEEEREFLVELKVPAASAGSHHVLTVRSSYRNPLTREPLIPVEQAMLVPRPHAVRSSCAKIERLRNLHVTARAVAESSRLAEHNDLSGAHHLLSSARALLLQSSKPEEEFLRWLEAEQAELQRRRQRQTQRNSRVEEKVEPLTPTSAWRAAERLAKVAIMRKSMNRVSDLHGFENARF

SEQ ID NO: 33026 - protein, 417 aa, Glycine max
  Clone ID: TF_GmC254_1.pep
MGNSHAKKRDTQFSRNVVEGRVPSPKNKTLSPSPSLEPPLPREPPPPAAMSLNKGSGKLSAKEKYALIPDNFTTLEQVTIALRKEGLESSNLVLGIDFTKSNEWTGSVSFNNRSLHAIGSTPNPYEKAISIIGKTLAPFDDDNLIPCFGFGDATTHDQEVFSFHSDHSPCHGFEEVLACYQKVVPNLRLSGPTSYAPVIEAAIDIVEKSHGQFHVLVIVADGQVTTSAASEHGELSPQEARTIKAIVDASSYPLSIILVGVGDGPWEDMKKFDDKIPARDFDNFQFVNFTDIMAKKSSPSEKEAAFALAALMEIPFQYKAATELGLLGRATGRSNKIVPRPPPAPYSQLVPPARVLSNTPTFMEDERNQMACAVCLTNAKDLAFGCGHMTCRECGHKLTNCPMCRERITSRLRVYSG

SEQ ID NO: 33027 - protein, 121 aa, Glycine max
  unsure (1)..(121): unsure at all Xaa locations
  Clone ID: TF_GmC254_2.pep
IKPLRKRNCFALAALXXIPFQYKAAIELELLGRATGRSNKIVPRPPPAPYSELVPPARVLSNMPTFMDDERNQMACAICLTNKKDLAFGCGHMTCRDCGSRLTNCPICRQRITNRLRVFSS

SEQ ID NO: 33028 - protein, 91 aa, Glycine max
  unsure (1)..(91): unsure at all Xaa locations
  Clone ID: TF_GmC254_8.pep
KSRATGRSNKIVPRPSSXPYSRLVPTARVLSNMPTFMDDERNQMTCAICLTNKKDLAFGCGHMTCRDCGSRLTNCPICRQRITNRLRVFSS

SEQ ID NO: 33029 - protein, 1729 aa, Glycine max
  Clone ID: TF_GmC23542_2.pep
MKKSSYPNPTPRRHDFHRPPPPTHGCGWAPRPAYHRPYHQWRPRFHPHAARIDRPPEPYFRVELRLGSSPLHRDDVEALIDECHSRHDTFTFYPVDDVAAVLSYRSWEQARDAVVWFWEARLAEKHDFTPTLDSNVVVVKDDVDCRLRPVFARHVKGLTEGKEVKRWMEESERLSKEISRLSSSLSKPLRLGVHNELVEKKKGLVDEKNLVERRLKEFESAMQCLLKYLEGGVDVEGVTVFRFDGGFDWKRIHCLIKRECRRLEDGLPIYAYRSDILQEIHYQQIMVLIGETGSGKSTQLVQFLADSGIGTDESIVCTQPRKIAAKSVAQRVQEESIGCYEGQSIKCCSTFSSSREFDSRIAFMTDHCLLQHYMSDNNLSGVSCIIIDEAHERSLNTDLLLTLLKSLLCRRVEMRLIIMSATADAKQLSDYFFACGIFRVLGRSFPVDIKYVPSDYAGDSGSAVVASYVSDVVRMATEVHKTEKEGTILAFLTSQIEVEWACEKFQAPSAVALPLHGKLSSDEQFRVFQNYTGKRKVIFSTNLAETSLTIPGVRYVIDSGLVKDSRFDPGSGMNVLKVCWISQSSADQRAGRAGRTEPGVCYRLYTEADYQSMDLNQEPEIRRVHLGVAVLRILALGVKDVQGFDFVDAPSPSSIDMAIRNLIQLGAIELNNDVHDLTSEGWCLVRMGIEPRLGKLILGCFKHGLGREGIILAAVMANASSIFCRVGNEFDKQRSDCLKVQFCHCDGDLFTLLSVYKEWEALPRERKNKWCWENSINAKSMRRCQDTILELETCLEREHDVVTPSYWRWDPCMPSNHDKNLKRVILFSLAENVAMYSGCNQLGYEVAQTGQHVQLHPSCSLLVFAQKPSWVVFGELLSISNQYLVCVSAFDFQSLYDLCPAPLFDVSKMEERKLLMKTLSGLGCILLKRFCGKANCNLLALVSRIRKACMDERIFIEVNVDNNEIHLYASSNDMDIALGLVNDVLEYERKWLRTECMDKFLYHGSGFSPPVALFGSGAEIKHLELEKRSLSVDVCHPNINEIDDKELLMFFEKNTSGCICAVHKFTGNTRDEDRDKWGRITFMSPDIVRRAAELDGREFCGSSLKVVPSQLGGDKTFSFPAVKARISWPRRLSRGFAIVKCDIKDVDYILRDFYNLAVGGRYVRCEVGKKSMDSVVINGLDKELSEAEISDVLRTATTRRILDFFLVRGEAVGNPPCSALEEALLKEIYPFLPKRNPHISPCRVQVFAPEPKDAFMRALITFDGRLHLEAAKALEQIEGKVLPGCLSWQKIKCQQLFHSSLTFPTPVYRVIKEQLDEVLASFRNLKGLECNLDRTFNGSHRVKITANATRTVAEVRRPLEELLRGKTIEHDSLTPAVLQLMLSRDGFSLKNSLQQETGTYILFDRHNLNLRVFGSPNMVALAQEKVIQSLLSLHEEKQLEIHLRGRDLPPDLMKQMIKNFGPDLHGLKERVPGVDLTLNIRRHIIILHGSKELKPRVEEIVFEIARSSHHLVERFGNGPSCPICLCEVEDGYRLEGCGHLFCRMCLVEQFESAIKNQGTFPVCCTHRDCGDPILLTDLRSLLFGDKLEDLFRASLGAFVATSGGTYRFCPSPDCPSIYRVADPGSAGEPFVCRACYSETCTRCHLEYHPYLSCERYKEFKEDPDSSLIEWCRGKEQVKCCSACGYVIEKVDGCNHVECKCGKHVCWVCLEFFSTSNDCYDHLRTIHLTI

SEQ ID NO: 33030 - protein, 272 aa, Glycine max
  Clone ID: TF_GmC32907_1.pep
LLEPATEKREDFGKLQYGCEHYKRRCKIRAPCCNQIFPCRHCHNDAANSSSNPADRHELVRRDVKQVICSVCDTEQEVAKVCSSCGVNMGEYYCEICKFYDDDTDKGQFHCDECGICRVGGRDKFFHCKKCCACYSVSVQNNHSCVENSMKSFCPICLEYQFDSIKGSTILKCGHTMHMECYREMATQNQYRCPICLKTIVNDMNWEYLDREIEGVHMPEEYKFEVSILCNDCNSTSTVSFHIFGHKCLQCGSYNTRRISKPKQEGLGVSGT

SEQ ID NO: 33031 - protein, 260 aa, Glycine max
  unsure (1)..(260): unsure at all Xaa locations
  Clone ID: TF_GmC145275_1.pep
AGGPFAVFLNVLNCMLGVTPGPVTYALAGPIPVKISVYWSMNMNPYNLGLSGPGSPSYYSSYAANGHLPRMEIDXAEWEYPSTIYHLXEEPATTDSPPRRDGVTNMQTIPEECSPKLHESNRRSQVIWQDNIASDKIAVEKILDPGVAARTYSKTIFXDDIKIFETLLYKFGKVVNRSNGVSRXLIYLLTYRKYKLDIXLTRKTSGKRCVIXQSAYRRGEKCPKLPCSHVYHGECITKWLSINKKCPVCNTEVFGEESTH

SEQ ID NO: 33032 - protein, 142 aa, Glycine max
  unsure (1)..(142): unsure at all Xaa locations
  Clone ID: TF_GmC1422_1.pep
SRRKRWRTPAATSGGDLAGIICSISYEPLNLISEDLQSVSICVHVFHELCLRQWLEYSSKGKKHTCPICKQGCRASDACWLYFQSVGDANDSVKPQKSFELEEDAGXLRREVNVSGLNSQVEGQTKELEGLNEKVFLFYFIF

SEQ ID NO: 33033 - protein, 651 aa, Glycine max
  unsure (1)..(651): unsure at all Xaa locations
  Clone ID: TF_GmC1040_1.pep
MGSGWRRAFCTSDPDNSTIRTKHRTQSPTPSPRSCVSLGFLSSTITELSSNSSPKFQTKTNTSNSNSPLSPKLNLSLFGNSFKFRNNCGICSNSVKTGQGTAIYTAECGHAFHFPCVVSVSHARTNVCPVCDATWNDVPLLQNNAEKQNQPIHHHRSDSVSSYDDDEPLPSPLTCSAQIAPIPEDEENDDVSEFPGFFVDPKPQSSLRQNDGGDSRSVRVKLMPECAVISVSQSHETRALVLRVKAPPVLSXRDGGGLPMDLVTVLDVGNSMSGAKLHMLKRAMRLVISSLGAADRLAVVASAADSKRLLPLRRMTAQGQRAARRVVDRLVCGHGNSVGEEAMNIAAKVLEDRRERNTLAKILLLSDGHDNANNKNQRRFLSHVSSSIRFDCIKVPVLSYGFETKRTGLMHEPLEDDFALYVDRTLSVAVHDLRIQLGFSAPAEIRAVYSCSGGPTALSTSAARLGDLYAEEEKELLVEVRVPTSALGTHHVMTLRCVNINKDPVSQEFVYGAEHVFTVVPPPKSIPICGGRVERLRNVFITSRAVAESRRLAKHNDFSSAHHLLSSARALLAQLGSAEEYVRGLEAELVELQWQKQQQRVEREARWVDESGEVLTPTSAWRAAEKLAKMARMKKSLNKVSDLHGFENARF

SEQ ID NO: 33034 - protein, 91 aa, Glycine max
  Clone ID: TF_GmC1719_4.pep
FEKKKGEFRVKVVKQILWVNGIRYELQEIYGIRNSTENDQGKCVICLSEPRDTIVLPCRHMCMCSGCAKDLRFQTDRCSICRQPVERLLEI

SEQ ID NO: 33035 - protein, 158 aa, Glycine max
  unsure (1)..(158): unsure at all Xaa locations
  Clone ID: TF_jC-gmXLIB3563P041dc12a1.pep
KEAFELGALARXXPCKHLYHSDCILPWLSMRNSCPVCRHELPSEQTAPETRVAGQIEEEAVGLTIWRLPGGGFAVGRFAGESHLPVVYTEMESDGNSNEGFRRISLAVGSGRVRESRGGGFGRIFRNLFGRIGALTRSRSLSTSLFNRRSFRAWVLGN

SEQ ID NO: 33036 - protein, 75 aa, Glycine max
  Clone ID: TF_GmC631_3.pep
MHSQNVVEMEGKTEIRMTSAAAFVEGGIQESCDDACSICLEEFCASDPSTVTTCKHEFHLQCILEWGERSSQRPI

SEQ ID NO: 33037 - protein, 245 aa, Glycine max
  Clone ID: TF_GmC54531_1.pep
MAILILSHAFGEDNVGQTIITSPSELSICSFAAAGNCPRGEKCPHIHGDLCPTCGKHCLHPFRPEEREEHMKSCENKHKHLDALKRSQEIECSVCLELVLSKPTAAECKFGLLSECDHPFCISCIRNWRSSNPTLGMDVNSTLRACPICRKLSYFVIPSVIWYSTTEEKQEIIDNYKAKLKSIDCKHFDFGEGNCPFGTSCFYKHAYRDGRLEQVVLRHLGAADGDTVIAKDIRLSDFLSNMHLR

SEQ ID NO: 33038 - protein, 209 aa, Glycine max
  Clone ID: TF_LIB4390-013-R1-K1-H10.pep
MENNAFRDRILEDNEHEEIPDSFVCCVCLDLLYKPIVLSCGHICCFWCVYNSMNCLRESQCPVCRNQYYHFPTVCQLLHFLLLKIYTAAYKRRENQTLEEEKQSGFYSPQFDPDTCESQAKFGHSGSAANEGDDGTIYYDGESDIIGTPAKGKKMPQEELSVQRKLSVADVTCTMCKQLLFHPVVLNWGHVYCQTCVINIDDEMLRCKV

SEQ ID NO: 33039 - protein, 470 aa, Glycine max
  Clone ID: TF_GmC12260_1.pep
MFLLRVHSVEEEHPLDPRTIFQSQTNNPKFSQRRGALHLFRTSSHSSPSSLLFILAVPNYLSFHDFIPFCGPHLDRLHHLLFIRNDGTEDRYSVLIEFADHFAADAFYTNFNAKKFSPAEAEVCHILFLQSVEYSKYAEAAGTPPPGCTEIPTCPVCLERLDPDTSGILTTLCDHSFDCPCVSKWTYLSCQVCRFCQQQDEKPTCFICGTLDDLWVCMICGFVGCGRYKEGHAIAFWKGTQHCYSLDFKTQQIWDYVGDSYVHRLNQDLSKIDGKLEEMNFRCMSLEGDCGMCECREDLGINGALFNSKVETIVDEYNRLLTSQLETQRQYYESLLVEAKSKMESSMSEAVEKAAASEMQDIQNELEKCTEERNAIAEVNQKLIKNQEIWRKKFKEAEEREAKSIKLMNERIIDLEEQIRDIKIFLEAQKTIDKMSDSNGIKEGTVLPVAYEQSSPGHSKRNKKSGRRRN

SEQ ID NO: 33040 - protein, 102 aa, Glycine max
  Clone ID: TF_GmC138647_1.pep
DQAEDRLQQIPACGHTFHMSCIDLWLATHTTCPLCRFSLLTTAKSSTQASDMQNNEETQAMEFSESTSPRDLETNVFQNVSGEVAISTHCIDVEGQNVQNNQ

SEQ ID NO: 33041 - protein, 110 aa, Glycine max
  Clone ID: TF_uC-gmflLIB3275P162c09a1.pep
LKASAQSAELHNQSSTSPTSDCKGAKPQRETIARLLQELDNLEDFSEKEINSNRECIVCMKDEVSIVFLPCAHQVMCASCSDEYGRKGKATCPCCRVQIQQRIRVFGASS

SEQ ID NO: 33042 - protein, 428 aa, Glycine max
  Clone ID: TF_GmC6133_2.pep
MGGQNSKEESWRQSSSVRSSSSSWSAYLDPLSSYGFNEPQPSYSSYGYEAYGGDGMVRYDSTKLERRYSRISDHYSSIDQVSEALALAGLESSNLIVGVDFTKSNEWTGKNSFNRRSLHHIGRGLNPYEQAISIIGKSLAAFDEDNLIPCFGFGDASTHDQDVFSFYPSERFCDGFEDVLSRYREIVPHLRLAGPTSFAPIIEMAMSIVEQSGGQYHVLVIIADGQVTKNVDTKHGRPSPQEQKTVDAIVAASKFPLSIILVGVGDGPWDMMKEFDDNIPARAFDNFQFVNFTEIMSKSIPPSRKEAAFALAALMEIPSQYKAAIELKLLGSRQANAPQRHALPPPRYSSHAARFEPSIPPQHGNSHPFATAPSAPSSTSDNQLCPICLSNAKDMAFGCGHQTCCECGQDLQSCPMCRSPINTRIKLY

SEQ ID NO: 33043 - protein, 107 aa, Glycine max
  unsure (1)..(107): unsure at all Xaa locations
  Clone ID: TF_9204912.pep
EGITESHVTFAKAFVEGGVQESLDDACILCLEDFCKIYPATVTNXKHEFHLHCILEWCQISFQCPMCWQPIXLEGYYIXELLEAIYLERSYMDTPFKTAASFLHPTL

SEQ ID NO: 33044 - protein, 54 aa, Glycine max
  Clone ID: TF_GmC1738_6.pep
HASGEKTTEGEDGAELHAFPCNHHFHLSCIVKWLKMNATCPLCKYNILKGNEQV

SEQ ID NO: 33045 - protein, 201 aa, Glycine max
  Clone ID: TF_GmC1722_1.pep
LLNKEFDDRFPARVLGSFRFGSSNEIMSKNIPPSRKEAAFPPQPLMEIPSQFKPGSRLNLLGGRNANAPQRVALPTPSYGSASMGISKPYGSASFGASKPYGSASFDAPKPYGSASFSSSKPSHAASFEQSAPSYYDNTDPVGTAPPAPSSSYDNQLCPICLTNSKDMAFGCGHQTCCECGQDLQSCPICRSPINTRIKLY

SEQ ID NO: 33046 - protein, 57 aa, Glycine max
  Clone ID: TF_GmC1722_3.pep
MNLLTNRIGLLQLCPICLTNSKDMAFGCGHQTCCECGQDLQSCPICRSPINTRIKLY

SEQ ID NO: 33047 - protein, 158 aa, Glycine max
  Clone ID: TF_GmC1722_4.pep
AFALSALMEILSQYKAAIELNLLGSQNANAPQRVALPTPSYGSASMGTSKPYGSASFGASTPYGSASFDAPKPFGSSKPSHPANFEQSAPSYYDNRDLVGTAPPAPSSTYDNQLCPICLTNSKDMAFGCGHQTCCECGQDLQSCPICRSPINTRIKLY

SEQ ID NO: 33048 - protein, 186 aa, Glycine max
  Clone ID: TF_GmC883_1.pep
MDSGPPANDLCSVCHGNFHIPCQANCSHWFCGNCIMLVWQHGSVGCSCKCPLCRRAISLLVPTEESLRQQQDPEVSQILSKIHAYNRFFGGQPTTLYQRLRDLPFLLHRLLREFLHPHRSLPLLIRARVFVVMIASVIYLFSPIDIIPEGILGVVGFLDDLLIVLICFLHVAALYRSVLYLRHGGS

SEQ ID NO: 33049 - protein, 497 aa, Glycine max
  Clone ID: TF_GmC247_3.pep
IRLEIERERQRELQGLLEHRAVSDFAHRNRIQSLLRGRFLRNERTVEDERPPSMAASELVQLRQRHTVSGLREGFRSRLENIVLGQAGTSPDSTSNSNASETRGDGSQANSLVDGQQENYEQQIRSLETDVRQLPNRTGTLESSTSESISWQEASNQGGNWQEQIAEEGGGNWQRSPFDQTRDGRAVSDWPQEPPRNLTGEDPHPQEAQRIWHDDNTRETVGNWSEGPSGASRNRRGVPIRRFNRFHPPDDDNVYSMELRELLSRRSVSNLLRSGFRESLDQLIQSYVERQGRAPIDWDLHRNLPTPTPASPERDPDQQGEERDEGQHETINRPSLVLPSPPVPPPQPLGHQDLHQTGWSRQSMHRSEIEWEIMNDLRSDMARLQQGMNHMQRMLEACMDMQLELQRSVRQEVSAALNRSGGENGSSAETSDDGSKWGHVKKGTCCVCCDNHIDSLLYRCGHMCTCSKCANELIRGGGKCPLCRAPILEVVRAYSIL

SEQ ID NO: 33050 - protein, 87 aa, Glycine max
  unsure (1)..(87): unsure at all Xaa locations
  Clone ID: TF_13240189.pep
MEMQIELQQSMKQEVQTVKKEEKKSNNRTPKKGNCCICYEMKVDSVLYRCGHMCTCLKCANELQWNSGKCSICXAKIEDVVRVYVDG

SEQ ID NO: 33051 - protein, 243 aa, Glycine max
  Clone ID: TF_GmC1712_1.pep
FRMWNFASNCIAGTVGLKNDSKPTHSASECSDDENSVIGREEGLECPICWESFNIVENVPYVLWCGHTLCKNCILGLQWAVVKFPTLPVQLPLFISCPWCNLLSFRLVYRGNLKFPRKNYFLLWMVESMIGDRGDVSHDSLQGGQVCHPESSSSNHYHGDTSNYLSIETLHASLRKSLVLFVHLTAKFPLIIIFLLIVLYAIPVIAAILALYILVTILFALPSFLILYFAYPSLDWLVREIIT

SEQ ID NO: 33052 - protein, 214 aa, Glycine max
  Clone ID: TF_GmC1712_3.pep
FGCEKTTEGAEPPFLSHGAATVTLLYFLLPRFSIFARNRMWNFASNCIAGTVGLKNDSKPTHSASECSDDETSVIGREEGLECPICWESFNIVENVPYVLWCGHTLCKNCILGLQWAVVKFPTLPVQLPLFISCPWCNLMSFRLVYRGNLKFPRKNYFLLWMVESMNGDRGKSHSPFCSDNQQHSIKDNLTTGSQVSHGNLRRGQVCHPETLSS

SEQ ID NO: 33053 - protein, 339 aa, Glycine max
  Clone ID: TF_GmC66639_1.pep
MIPWGGLSCCLSAAALYLLGRSSGRDAEILKSVTRVNQLKELAQLLDAEILPLIVTISGRVSSETPINCEFSGLRGVIVEETAEQHFLKHNDAGSWIQDSALMLSMSKEVPWYLDDGTDRVHVVGARGASGFALPVGIEAFEESGRSLVRGTLDYLQGLKMLGVKRIERVLPVGTSLTVVGEAAKDDVGAIRIQRPHKGPFYVSPKTIDQLIANLGKWARWYKYASVGLTVFGAYLIAKHAIRYILERRRRSELQRRVLAAAAKKSGQNNDVEKADSLSDGAKKDRLMPDLCVICLEQEYNAVFVPCGHMCCCTACSSHLTNCPLCRRQIEKVVKTFRH

SEQ ID NO: 33054 - protein, 218 aa, Glycine max
  unsure (1)..(218): unsure at all Xaa locations
  Clone ID: TF_GmC12260_3.pep
MFLLRVHSVEEDHPLDPQTIFQSQSQSQSQSQSNNPKFSERRGALHLFRTSSHSSLPTQTSLSSLLFILAVPNYLSFHDFIPFCGPHLDRFHHLLFIRNDGTEDRYSVLIEFADHFAADAFFTNFNAKKFSPAEAEVCHILFLQSVEYSEYAEVAGTPPPGCTEIPTCPVCLERLDPDTSGILTTLCDHSFDCPCVSKWTYLSCPGCQFCXAQDEKPP

SEQ ID NO: 33055 - protein, 81 aa, Glycine max
  Clone ID: TF_LIB4280-025-R1-K1-G6.pep
MEGAGMEENNIINDDDNNNKSEAHLTSAAAFVEGGIQDACDDACSICLEAFCDSDPSTVTSCKHEFHLQCILEWYYYLAFH

SEQ ID NO: 33056 - protein, 161 aa, Glycine max
  Clone ID: TF_GmC3032_1.pep
AAWKGSPWPTWDQHYHRNNWSQNDLTNQHLVIDLEIINDLRIDMARLQQRMNNMQRMLEACMDMQLELQRSIRQEVSAALNRSAGSSGIHDCESPEDKSKWECVRKGLCCICCESNIDSLLYRCGHLCTCSKCANELLQSRRKCPMCQAPVVEVIRAYSIQ

SEQ ID NO: 33057 - protein, 119 aa, Glycine max
  Clone ID: TF_GmC386821_1.pep
MAVTGTSVAAAATMLAAAAAIFITFVICFYLFLCAKRYRGAAPTIGGDRARPRFVFAGGAGCHGGLDEAAIAALPREEAAAAGGDCAVCIGELAAGEAARVLPRCGHAFHVECVDMWLR

SEQ ID NO: 33058 - protein, 176 aa, Glycine max
  unsure (1)..(176): unsure at all Xaa locations
  Clone ID: TF_jC-gmro02910011g03a1.pep
GSRADSGGDLAGIICSISHEPLNLISEDLQSVSICVHVFHELCLRQWLEYSSKGKKHTCPICKQGCRASDACWLYFQSVGDANDSVKPQKSFELEEDAGXLRREVNVSGLNSQVEGQTKELEGLNEKLCTCKEQAKIEIALKNEVLNKKASIPASNEIRGEILCSLLFYFGQVNYL

SEQ ID NO: 33059 - protein, 252 aa, Glycine max
  Clone ID: TF_GmC5878_3.pep
IELMAARDLVNSRSAVVQTVNGVNRKYNDPRAGRKGRISSRANEISGTGVDDFESRSLDADDLKIELQARKQREAALEAALAEKEFVEEQYRKKTEEAKRREEALENDLANMWVLVAKLKKDGGAVPESNINIKKVDEEAHTNDLKTNGIESDIVPKEQILDVSIPENEIANEDPLVVRLKARMKEMRDKEFKHLGNGDANSHVCKVCFESSTAAILLPCRHFCLCKSCSLACSECPICRTNISDRLFAFTS

SEQ ID NO: 33060 - protein, 157 aa, Glycine max
  Clone ID: TF_GmC5878_5.pep
RGPKKREASLENDLANMWVLVAKLKKEGGAVPESNINIKKVDEEAHKYDRKTNGIESDIVPKEQILDVSIPENEIANEDPLVVRLKARMKEMRDKEFKHLGNGDANSHVCKVCFESSTAAILLPCRHFCLCKSCSLACSECPICRTNISDRLFAFTS

SEQ ID NO: 33061 - protein, 152 aa, Glycine max
  Clone ID: TF_GmC1712_4.pep
FRMWNFASSLIAGSVGLKNDSAKPTHPASECSDDETSMVTREERLECPICWESFNIVENVPYVLWCGHTLCKNCILGLQWAVVKFPTLPIQLPLFISCPWCNLLSLRLVYRGNLKFPRKNYFLLWMVESMNGDRVKSHSTVCGGSSTSLANN

SEQ ID NO: 33062 - protein, 145 aa, Glycine max
  Clone ID: TF_GmC1712_2.pep
LRMWNFASSLIAGSVGLKNDSPKPTHSASEFSDDETSMVSREERLECPICWESFNIVENVPYVLWCGHTLCKNCILGLQWAVVNFPTLPIRLPLFISCPWCNLLSLRLVYQGNLKFPHKNYFLLWMGENMNGDRVKSHSTVCGDH

SEQ ID NO: 33063 - protein, 245 aa, Glycine max
  unsure (1)..(245): unsure at all Xaa locations
  Clone ID: TF_GmC399_5.pep
GRVGSEGRPSFVLSTCSNEMTAGSICGSSDGWSMRIFSELVASSQRERWSFDSECFGSGRHKISGSSSRFSYSPSMELQSCGACSKLLTERSTWSNQKFISNSDLSVVAVLVCGHSYHAECLEAMTSEADRYDPACPICMVGDKHLSKLLSRKGLRAESDIKAKNHKISRNRVVDSYLDGGFDVFDRQKGIDLRGKXVKMEPSSSARSSFGKPFLRRHFSLGSKWSRSLSENDSARKKGFWARYR

SEQ ID NO: 33064 - protein, 131 aa, Glycine max
  Clone ID: TF_GmC1125_1.pep
GIEGDIVKNLRIHMVRLHPRMNNMHRMLEACMDMQLELQRSIRQEVSAADDQVEFITGIHDGVSTDDKSKWECVRKGLCCICCESNIDSLLYRCGHMCTCSKCANDLLQSRRKCPMCQAPVVEVIRAYSIQ

SEQ ID NO: 33065 - protein, 85 aa, Glycine max
  unsure (1)..(85): unsure at all Xaa locations
  Clone ID: TF_GmC1125_2.pep
VSAALNRSTGSSGIHDGVXRDKSKWECVRKGLCCICCESNIDSLLYRCGHMCTCSKCANDLLQSRRKCPMCQAPVVEVIRAYSIQ

SEQ ID NO: 33066 - protein, 298 aa, Glycine max
  Clone ID: TF_GmC30762_1.pep
MKTTAEVVSSHCLVVAECSQSSPTQLSAMEPQILNLGCMHYRRRCKIRAPCCDEVFDCRHCHNEAKNSEEVDAVDRHDVPRHEIKKVICSLCDVEQDVQQYCINCGICMGKYFCTICKFFDDDISKNQYHCDECGICRTGGKDNFFHCNRCGCCYSKVMEKGHRCVEGAMHHNCPVCFEYLFDTVREISVLPCAHTIHLDCVKEMEKHQRYSCPVCSKSICDMSSVWEKLDELIASTPMPETYKNKMVWILCNDCGVNSHVQFHIVAHKCLSCNSYNTRQIQGVPATSSSSRVTEMVR

SEQ ID NO: 33067 - protein, 72 aa, Glycine max
  Clone ID: TF_GmC5878_2.pep
FQARMQEMKEKELKYLGNGDANSHVCKVCFESPTAAILLPCRHFCLCKSCSLACSECPICRTNITDRIFAFT

SEQ ID NO: 33068 - protein, 160 aa, Glycine max
  Clone ID: TF_GmC5878_4.pep
MISGAEEAKRREEALENDLANMWVLVAKLKKDGGAVPESNIDKKNDGAEHINGPKTNDVESNIVPKEHLLDAPKPDEEMPKEEPLVVRLKARMQEMKEKELKYLGNGDANSHVCKVCFESPTAAILLPCRHFCLCKSCSLACSECPICRTSITDRIFAFT

SEQ ID NO: 33069 - protein, 134 aa, Glycine max
  Clone ID: TF_GmC32907_2.pep
KGQFHCDECGICRVGGRDKFFHCKKCCACYSVSVQNNHSCVENSMKSFCPICLEYQFDSIKAPPILKCGPPMHMECYREMATQNQYRCPICLKTIVNDMNWEYLDREVCGTIIKFCFEIFFVGLCMTMFYVFEL

SEQ ID NO: 33070 - protein, 234 aa, Glycine max
  unsure (1)..(234): unsure at all Xaa locations
  Clone ID: TF_GmC137799_1.pep
MMWSFASNALTSIRLKIGSKQPSLLHSEYRALGLVLWPSREEGLECPICWESFNIVENVPYVLWCGHTLCKNCILGLQWAVVKFPTQQIKIPFFISCPWCHLLSFRIIYKGNLKYPCKNFFLLWMVESLNGDRHKVFSTCTDNQPIWSPKCNLLGSQVTNCNLRRASVXLFLDCWDLKVMFVTMMVQHTTFLILNCAVILVLHFLVTILFAISSFLVLYFAYPTIQRLVREITS

SEQ ID NO: 33071 - protein, 446 aa, Glycine max
  Clone ID: TF_GmC399_1.pep
MGSACCVAAKDPNLPNRTGDESLHRDVVCSPSGSFQWDSRGRFADEIENPSYHTSHVDSRNVSMELKGSLSSERGNLSDGGSIVENSVTPIFLKSPVDEALVANLMTPTSDLSMSSNFSTVVKNPAGTREILTRERKEDAVSHSHRIETEAPFPFSNNLYPNAVITDHLRNSTPTRWAHRSPAHPLLRQISDSRIMGLKSPDNSISEGRPSFVLSTCSNEMAAGSICGSSDGWSMRTFSELVASSQRERWSFDSECGIFLGHKISGSSSRFSYSPSMELQSCGACSKLLTERSTWSNQKFIANSDLSVVAVLVCGHSYHAECLEAMTSEADRYDPACPICMVGDKNLSKLLSRKGLRAESEMKAKNHKISRNRVVDSYLDGGFDVFDRQKDIDLRGKVSKMEPSCSARSSFGKPFLRRHFSLGSKWSRSLSENDSARKKGFWARYR

SEQ ID NO: 33072 - protein, 305 aa, Glycine max
  Clone ID: TF_GmC287_1.pep
MRCNACWREVEGRAISTTCGHLLCTDDANKILSNDGACPICDQVLSKSLMKPVDVNPNDEWVNMAMAGVSPQILMKSAYRSVMFYLGQKELEMQFKMNKIVAQCRQKCEMMQEKFTEKIEQVHTAYQKMAKKCQMMQQEIESLTKDNQELQEKFAEKSRQKRKLDEMYDQLRNEYDSVKRSAIQPADNFYSRNEHDLFSNPPNIMDGREMGRKGGLVFTPATPGPREDVWPARQNSNNSGHFDLSVGSPAKQTVIAGDAGNRRAGAHPVFGPGATNNPSMTLRNLILSPIKRPQLSRNRPQLFTL

SEQ ID NO: 33073 - protein, 76 aa, Glycine max
  Clone ID: TF_GmC5791_3.pep
EQLKISSYLNVVQVRGLPCAHNFHVECIDEWLRLNVNCPRCRCSVFPNLDLSALSNIRSESEQSSATAVTSRDMTG

SEQ ID NO: 33074 - protein, 133 aa, Glycine max
  unsure (1)..(133): unsure at all Xaa locations
  Clone ID: TF_GmC135433_1.pep
NSARWIEQDVELTHGHMRVLRLDIVNMSXEQLLALKERMGTVSTALTEETLSECVKKSVYQSSPSDKEAERCKEHKDDTTRPILQEEYVAAEEVGSLQCEHMYHVACIQQWLQLKNWCPICKASVAQSNSSPS

SEQ ID NO: 33075 - protein, 698 aa, Glycine max
  Clone ID: TF_GmC241_1.pep
TPHESDTAIALRSNSPIHWISMKNKNSRANRKARSVKPPDSCLSSSNSNKKWMVPYKFYDVKGPNSESNPNVDSSSWVLCTEVQLETILLKNIEIIYNDTVPKLVALGYSEEIAVKAILYNGHCYGANDLATNVLHNSLACLTTGTLDLSESSPAFPDMKKLQEYSLMNLVSLLKEVRPDLSRGDAMWCLLMSNFHVLKAGAIPVPVGNTCPPPPPPLPELENTGWRFAKEGGLGFPLNGLFSDTDMTIRLQRDIEFPKRFDLTPAMKSLLKRNVAMFADGFRANSKQVQPQASEFPRTGSVSKLGSSSASGTAAVLGEQPGDSHNQNDQEDLNSVMSKFLDLNIDDNVEFVPEDDKEEVIVTLVNQIKDLEKQVKERKDWAHEKAIQAAKKLSSDLIELKKFKMEREENKKLPKETGAAEELDNPTMMRLSEMENALRKTSGQMDQATAAVRKLEAEKAEIKAELEASKLSASESVTSCLQVAKREKKCLKKLLTWEKQKVKIHQDISDEKQKILEIQEELAQIKQCAKETEVTRKEELKAKEEALALIEEERRSKEAAEANHKRNLKALRLKIEIDFQRRKDDLPKAGAEIHALKAPARSTTLPTSESEDAEPQRETLAKLLLELDNVKDFSGKEINGDRECIICGKDEVSVIFLPCAHQVMCARCGKEYGKKGKAVCPCCRVPIEERIPIFGACS

SEQ ID NO: 33076 - protein, 428 aa, Glycine max
  Clone ID: TF_GmC35912_1.pep
MGGSISKRRRSRQRSASNFLPRYQQPHFPQSQDNGSVGHYGYSSQSYSGGRAPEQVKSLDRKYLRIGDDYKSLKQVTDALAKAGLESSNLIVGIDFTKSNEWTGGRSFQRRCLHHIGHEQNPYEQAISIIGKTLSSFDEDNLIPCFGFGDASTHDQEVFSFYPDERFCRGFEEVLERYRELVPQLKLAGPTSFAPVIEMAITIVEQSGGQYHVLVIIADGQVTRSVDTEHGQLSAQEKKTVEAIVKASEYPLSIILVGVGDGPWDMMKQFDDNIPARAFDNFQFVNFTEIMSKNMDRSRKETEFALAALMEIPSQYKATLELNILGACRGKDIDRIPLPPPLYGAASFNSPKTSRQYSSRPSAPSSRHDVSTNPPATSASDNQVCPICLTDPKDMAFGCGHQTCCDCGQDLELCPICRSTIDTRIKLY

SEQ ID NO: 33077 - protein, 429 aa, Glycine max
  unsure (1)..(429): unsure at all Xaa locations
  Clone ID: TF_GmC1087_3.pep
MSWRRVLNSAQALAAHTFLLCFTLFLVLKLDHNLSSSWWVIFSPLWMFHGVVARGRFSLPIVAMXAVGLKIVFLPLLTFEIIILIDNFRMCKALMPGDGENMSDEAIWETLPHFWVAISMVFFIAATVFTLLKLSGDVGALGWWDLFINFAIAECFAFLVCTKWSNPVIHRNSREASSSSSTTITYLDWNSGLVVSTDENQHQGRMCSLQDIGGHFMKVPIIVFQVLLCMHLEGTPACAVHIPLPVIFSPLFLLQGAGVMLSASKLGEKLVLLLRSGAGGGIYFRFSSRAHDCLGFLHHGSRLLGWWSIDEGSREEQARLYHEGAIGYNTFCGYPPEIVKKMPKKELAEEVWRLQAALGEQTEITKFSQQEYERLQNEKVLCRVCFEGEINVVLLPCRHRVLCSTCSEKCKKCPICRDSIAERLPVYDV

SEQ ID NO: 33078 - protein, 74 aa, Glycine max
  Clone ID: TF_jC-gmst024165h11a1.pep
GSSSSRIVLRFDQFFVHILWYQEKVLCRVCFEGEINVVLLPCRHRVLCSTCSEKCKKCPICRDSIAERLPVYDA

SEQ ID NO: 33079 - protein, 424 aa, Glycine max
  unsure (1)..(424): unsure at all Xaa locations
  Clone ID: TF_GmC1334_1.pep
MGSACCVAAKDHTIPSTSRTGGESLNRNAXRVAGEIEDPSFHTSRRVSRNVSMELKGSLSSERGNLSDWGSTLDNSVTPLSLKSPVREHLVTSQMTPSSGLSMSSNCSAVVKNLIESPEIAESSIPNRSVPSVFSIPTTDPMTNHNYHNLPNSTPSRWAHCSPGHPLLTQISDSRILGLKSPDNSISEGRPSFVLSNCSNDMATASQCGPVIGWSMRTFSGWVAPSQVEGCPLATVFSGSARPKIRGSSSRFSYSPSMDLQSCGACSKLLTDRSAWGSQKFIASSDLSVVAVLVCGHVYHAECLETITPEADSYDPACPICMVGEKYMSKLSKKGLWTESETKTKNYKISRNRVVDSYVDGGNDVFDRLKDIVSKMEPSSSSTRSSFGKPFLRRHFSLGSKWSRSLLENDSARKKGFWARCRRD

SEQ ID NO: 33080 - protein, 52 aa, Glycine max
  Clone ID: TF_LIB4164-010-Q1-N1-H1.pep
CVIRRVAYRDGETLTVMSCKHLNHPECIHNWLKIDKVCPVCRPEVFASGSNL

SEQ ID NO: 33081 - protein, 74 aa, Glycine max
  Clone ID: TF_GmC1151_1.pep
SEFSEEEEIRCMANCKHIFHCACVDRWIDHDQKTCPLCRSTLVPHQKLEEYNQRLWAASGVSQFYYQDDYTASL

SEQ ID NO: 33082 - protein, 304 aa, Glycine max
  unsure (1)..(304): unsure at all Xaa locations
  Clone ID: TF_GmC6780_1.pep
MPQRHSKNNNDLAFFTYDEKRKLGYGTQKERLGKDSIKPFDACSLCLKSLIDPMSCQKGHLFCKECILQCLLSQKKDIQRKLAAHAAQQKQEKEEEEEKLKLQKAKELDAFDQQNHGAVPQYSDRNYSRDKNGFHGANSVKVTSYEEEALRTMKAFWLPSATPEASIKVDAPSNSTICPEGNEKLKLKTLFPVQFTEDTTEQKKXKALDKTYICPSCKVTLTNTMSLVALSTCGHVFCKKCADRFMAVDKVCLVCNKACKERNLVNLEKGGTGFAGHGDHLEARDFKHLGSGSGLGLVRPAMKT

SEQ ID NO: 33083 - protein, 111 aa, Glycine max
  Clone ID: TF_GmC6780_2.pep
QFTEDTSELKKFKALDKTYICPSCKVTLTNTMSLVALSTCGHVFCKKCADRFMAVDKVCLVCNKACKERNLVNLEKGGTGFAGHGDHLEATDFKHLGSGSGLGLVRPAMKT

SEQ ID NO: 33084 - protein, 330 aa, Glycine max
  Clone ID: TF_GmC76377_1.pep
MTLPSHDAWIHTSHTLLPRWKSLSLPHQQSTLPISISRVNQVDAARLDVEMSAMLKEQLVKVFSLMKPGMLFQYEAELDAFLEFLIWRFSIWVDKPTPGIALMNLRYRDERAVEPRDKVRTGLEGPGLTVAQNGCERIADVGGQYIWARLQSFSAFRRWGDTEQRPLARRLWILIQRIEGIYRAASFGNLLIFLCTGRYRNLIERALRARLVYGSPNMNRAVSFEYMNRQLVWNEFSEMLLLLLPLLNSSSVKNLLRPFSKDKSLSSAEDGSACPICQATPTIPYVALPCQHRYCYYCLRTRCAAAPSFRCSRCSEPVVAMQRHGGVPSE

SEQ ID NO: 33085 - protein, 119 aa, Glycine max
  Clone ID: TF_uC-gmroLIB3259P253e08a1.pep
VYGSPNMIRAVSFEYMNRQLVWNEFSEMLLLLLPLLNSSSVKNLLRPFSKDKSSGSAEDGTACPICQATPTIPYVALPCQHRYCYYCLRTRCAAAPSFRCSRCSEPVVAMQRLGGVPTE

SEQ ID NO: 33086 - protein, 188 aa, Glycine max
  Clone ID: TF_GmC74179_1.pep
PTDEGTRGRTRGRTRGQGAGVCPAAYRLIEKIVLLLYCGDIPERYSAIASKSRECFGFFRRGSRLLGWWSIDEGSREEEARLFCAGSPGYNTFTPDTVKKMPRADLVEEIWRLQAALGEQTQVTKFSQDEYERLQNEKILCRICFEEQINVVLLPCRHHILCSTCCEKCKRCPVCRGPIEERMPVYDV

SEQ ID NO: 33087 - protein, 325 aa, Glycine max
  unsure (1)..(325): unsure at all Xaa locations
  Clone ID: TF_GmC74179_2.pep
GSEFGSSSSRSSRFHRMCRALVPGDDENLTDEAVWETLAHFWISISMVFFIAATVFTLLKICGDVAALGWWDLFINFGIAQCFAFLVCTKWHNPTIHGGCHITEPCSSSNTIRYLDLRTGGLVVYTDEDRQQNGFCNLQDIGGHIMKIPFIGFQILLFMHLEGTPSSAKNLPHWVIFSPLFLLQGAGVLFAAYRLIEKIVLLLYFGDIPERYSAIASKSRECFGFFRHGSRLLGWWSIYEGSREEEARLFCAGSPGSVLYPQEVKXEYERLQNEKILCRICFEEQINVVLLPCRHHILCSTCCEKCKRCPVCRGPIEERMPVYDV

SEQ ID NO: 33088 - protein, 72 aa, Glycine max
  Clone ID: TF_21602652.pep
KRLVQCILYNNCENTPNSFESPLLNILLHISNTSSILSLLFLILLFCHSNFLVLIYNNFKGRGYYSVTTIAK

SEQ ID NO: 33089 - protein, 96 aa, Glycine max
  Clone ID: TF_GmC1149_5.pep
VTQPFCFFGQLPFSSINLCIVFHIQYKQEFSFFAVNYHFIFQNSCILCEESAIICYRVKVYIRAETFAYYTQELPCLRAVIIIFLFWVFNEVVSVT

SEQ ID NO: 33090 - protein, 85 aa, Glycine max
  unsure (1)..(85): unsure at all Xaa locations
  Clone ID: TF_700973284H1.pep
QTRGASSESINALPTYKFKMKRNKSKGESNSAVGEGGVVAAXTEKERMISGEDAACCICLAKYENNDELRELPCSHLFHKDCVDK

SEQ ID NO: 33091 - protein, 111 aa, Glycine max
  Clone ID: TF_LIB3093-023-Q1-K1-C5.pep
DLFTSSATVRALPCGHYMHSCCFQAYTCSHYTCPICSKSLGDMAVYFGMLDALLAAEELPEEYRDRYQDILCHDCDRKGTSRFHWLYHKCGSCGSYNTRVIKSEAANSSCL

SEQ ID NO: 33092 - protein, 67 aa, Glycine max
  Clone ID: TF_LIB3093-047-Q1-K1-B9.pep
MEADFVTSDMLTLTQDAFYANDNDDVAVEGERCGICMDMVIDRGLLDCCQHWFCFVCIDNWATITNL

SEQ ID NO: 33093 - protein, 124 aa, Glycine max
  unsure (1)..(124): unsure at all Xaa locations
  Clone ID: TF_GmC76829_1.pep
MTTEPDVESKYAHNGKGMVGTAILLFILIIIIIFFHTYVRSCRRRRRFSHSLPTNSSAAASLDDPCLDPSIIKSLPTFTFFRRLPPLSXDCAVCLSEFSDRDEGRVLPNWKHSFHAHCIDTWDR

SEQ ID NO: 33094 - protein, 120 aa, Glycine max
  Clone ID: TF_6455111.pep
SPWSSRRIVRSGDMPTIGVLPCCHAFHAECLEQATPKTRKSDPPCPVCVKLEENSPDQRSHLRLRTGFPKLKSSRDNGPSRPWGCVQVSDCVERALHAPPSNTMLLLNQNRIKNPSLKRI

SEQ ID NO: 33095 - protein, 49 aa, Glycine max
  unsure (1)..(49): unsure at all Xaa locations
  Clone ID: TF_LIB3087-010-Q1-K1-D12.pep
MLHLEKLDLELKSPLCLSXHKRPVLLPCNHSYCNTCLADCITAGPRCAV

SEQ ID NO: 33096 - protein, 118 aa, Glycine max
  Clone ID: TF_GmC1579_1.pep
MATLDSDVTVVPAGEASTSAGPSSSTKKPKRFEIKKWNAVSLWAWDIVVDNCAICRNHIMDLCIECQANQASATSEECTVAWGVCNHAFHFHCISRWLKTRQVCPLDNSEWEFQKYGH

SEQ ID NO: 33097 - protein, 118 aa, Glycine max
  Clone ID: TF_GmC1579_2.pep
MATLDSDVTVFPAGEASSSAGPSSSTKKPKRFEIKKWNAVSLWAWDIVVDNCAICRNHIMDLCIECQANQASATSEECTVAWGVCNHAFHFHCISRWLKTRQVCPLDNSEWEFQKYGH

SEQ ID NO: 33098 - protein, 300 aa, Glycine max
  unsure (1)..(300): unsure at all Xaa locations
  Clone ID: TF_GmC1361_2.pep
MMEWPSFSFGSSQIRKHFLIFPFPVSHPNLMEGSVNERLDFGKMGYGCNHYRRRCRIRAPCCNEIYSCRHCHNDAASLLKNPFDRHELVRQDVKQVVCSVCDTEQPVAQVCTNCGVKMGEYFCNICKFFDDDVEKEQFHCDDCGICRVGGRDNFFHCKKCGSCYAIGLRDNHLCVENSMRHHCPICYEYLFDSLKDTFDXIVMKCGHTMHHECYLEMIKNDKYCCPICSKSVIDMSKTWKRIDEEIEATVMPEDYRNRKVWILCNDCNDTTEVYFHILGQKCGHCRSYNTRAVAPPVLPQ

SEQ ID NO: 33099 - protein, 36 aa, Glycine max
  Clone ID: TF_700875744H1.pep
EEYENMDDVGTLQTCGHIYHVSCIIPWLTMKSFCPI

SEQ ID NO: 33100 - protein, 160 aa, Glycine max
  Clone ID: TF_GmC1714_1.pep
MGFPVGYTELMLPKVFLQVLSVLGLIRKLITVLLCYMGFHDFFESDIAWPERAPEFQSVWAVLIREILPVVKFSEMEMEMAEAPESCAVCLYEFEGEDEIRRLTNCRHIFHRGCLDRWMGYDQRTCPLCRTPFIPHHMQAAFNDRLWAASGIPDFYYNHE

SEQ ID NO: 33101 - protein, 329 aa, Glycine max
  Clone ID: TF_GmC266_1.pep
MASFPSNSAWEHSMASAQQNSNPHASSPSFMTRVAMRISRSRWFTFLRRVFHYQNGPRSNLGSNPFNSSTWMMLELIALLVQIASTTFTLAISKSEKPIWPMRVWIAGYDIGCVLNLLLLCGRYHQLHVTQGNNALSLSELEQQRNNEESSVYRTSHLIDKCRSSLELFFAIWFVMGNVWAFDSRFGSFPQAPKLQVLCIILLSWNAICYSFPFLLFLLLCCCVPLMSTLLGYNMSMGSSARGASDDQISQLPSWRYKGLHSNLDIANDSQSSERLINQDPECCICLAKYKDKEEVRQLPCSHLFHLKCVDQWLRIISCCPLCKQGLQR

SEQ ID NO: 33102 - protein, 185 aa, Glycine max
  Clone ID: TF_GmC266_4.pep
INLVPCSVYRSSHLIDKCRSSLELFFAIWFVMGNVWAFDSRFGSFPQAPKLQVLCIILLSWNAICYSFPFLLFLLLCCCVPLMSTLLGYNMSMGSSARGASEDQISQLPSWRYKGVHTNLDLGNDSQSSERLINEDPECCICLAKYKDKEEVRQLPCSHLFHLKCVDQWLRIISCCPLCKQGLQR

SEQ ID NO: 33103 - protein, 419 aa, Glycine max
  Clone ID: TF_GmC668_1.pep
MNQLGGVSVILLVLSVLCFHVRAQTSAPSSGDAVSNFQPSLAVVIGILGVMFLLTFFLLMYAKFCHRRHGGASAVGDSENQLTFVRSRSRFSGIDKTVIESLPFFRFSALKGLKEGLECAVCLSKFEDVEILRLVPKCKHAFHIDCIDHWLEKHSTCPICRHRVNPEDHTTFTYSNSLRMLAGEESNIEILVQREEEEHHGSSRFSVIGSSSFRKTVKEEELLIQKGAEDSDGNQKGYHKHNHRITISDVVFKHRWSNVSSSDLMFLNSEMLNDTSSNRFSSNLESITRGVVVENEQIMNIKEEMERKISFENKVVGALNNIVSDHKEDPPFTSDSAPKYVNPGEKRSMSEITAVSRFGDLGMKMRVLKDSDSLQNNLKEERMRQIWFPIARRTAQWFVNREERRSLQSQNNKQQPLDV

SEQ ID NO: 33104 - protein, 215 aa, Glycine max
  unsure (1)..(215): unsure at all Xaa locations
  Clone ID: TF_GmC153_1.pep
METGIIQGPWGFRSLSKFVLCTISGALTVCFALAGALTGAIAGALAAKATKSGLLRGVSLGAIAGSILSVEVLEASRAYWCMEQTGSRSASSMADFIEELVRGRLVEESLTPAILTAYNLQFEQVGIANTGYVETHDVHGLVAPRETCXPLRSYDGVTPPMISKAENTCCAICLQDIEVGEIARSLPRCHHTFHLICVDKWLVKNDSCPVCRQNV

SEQ ID NO: 33105 - protein, 209 aa, Glycine max
  Clone ID: TF_GmC627392_1.pep
MDPHLPKNGTQQHHGTPTPSPASVANNIIIPHPEFRIPSFKEHHKNVPQLAMIVMACMVGVIMFLCAVSVLIRYFYSRRYSRNNQNRRVDAPILFDLNGDSPPSSDNDDDVEELAVVHPIWYIRTVGLQQSLIDSITVFRYKRGEGIIDGTECSVCLGEFEHDESLRLLPRCSHAFHIPCVDTWLRSHKNCPLCRAPVLRDETDGAHVI

SEQ ID NO: 33106 - protein, 299 aa, Glycine max
  Clone ID: TF_GmC938_2.pep
MSSGGGGGGAKPFFCHVCSQRITCSDESEPFCPICMESFVEECNPNNPNPNLFTENEESSDSEISFSLLPLFLSSVSRSRPEPDMFDPMVFLQNHIQGLRADGANIQVDFGHPSEQQGFRLPANIGDYFMGPGLEQFIQQLADNDPNRYGTPPAAKDAVENLPTITVDDELLNSELNQCAVCQDEFEKGSLVTQMPCKHAYHGDCLIPWLRLHNSCPVCRYELPTDDAEFGSSEVRGNGGDGGSRTGGSGDSGGGSCGGGGGGSNRPVRRTVRIYLRHPDAADSAQDSAERGWEWGSWD

SEQ ID NO: 33107 - protein, 105 aa, Glycine max
  Clone ID: TF_uC-gmflLIB3275P147a09a1.pep
QKAAFAYSGSSSMQQTSSSTPAEKKQDNSTAVGSMKASDDELTCSVCLEQVDVGDVLRSLPCLHQFHANCIDPWLRQQGTCPVCKFRAGSGWSDNGHNDIIADMV

SEQ ID NO: 33108 - protein, 217 aa, Glycine max
  Clone ID: TF_LIB5118-056-A1-PF1-F7.pep
HFPHSIFHHDLLFLFYFFLLTEFPPQATAQPPNTLTPPPQQDRFTRLKFDKSMAIVLLILVVVFFILGFLSVYTRQCAERRMGGRFDLSILISRRQRGLGREVIETFPTFVYSTVKSLKIGRATLECAVCLNEFEEDETLRFIPNCSHVFHSDCIDAWLANHSTCPVCRANLTSKPDDRCSAPIQNPDPEQPVLTSSTRPETVGADLLSQNRTPPRP

SEQ ID NO: 33109 - protein, 129 aa, Glycine max
  Clone ID: TF_LIB4390-049-R1-N1-G9.pep
MTLPPKRYARRVSLYYRNNAAKPLKEKQRENDEDSKSCAICLEDFDPNEEVMLTPCNHMFHEDCIVPWLTSKGQCPVCRFVICEIGRGNHSSFNNNDIANLEPSNLINGELLSILRAMEKAFQLGSMTY

SEQ ID NO: 33110 - protein, 273 aa, Glycine max
  unsure (1)..(273): unsure at all Xaa locations
  Clone ID: TF_GmC1689_1.pep
MEGGRRRITLYDQMKAGNSSRYSLASLMLGDVVFKKVEAEEAEEAEAEAEASCELSRSRTLQDIIREEKPSNSSNNTKDRNSWRAFTAKLRLKRAIGSAWSSTTTITNHSNDDRNLPNIPETRHDSDELTQQNDIVVDGANDSDPIAPAGSPVEHVEAVGNSSDGENNHEAVVGVSLMDLLXEAKQEMDLYRVSDDDDDVAEYEKREEEKGTAARRLQRGVEYNCCVCMVRHKGAAFIPCGHTFCRTCSREIWVSRGNCPLCNNLILEILDIF

SEQ ID NO: 33111 - protein, 344 aa, Glycine max
  Clone ID: TF_GmC1738_1.pep
MSSPNSVPQSHAPLLLPRPDAAARLPILALLLGRRGHSAVVRETAARELEERRADWTYSKPVVALDMTWNMAFVLVSAVMLACTVKENPNTPIRWWICGYALQCLVHVALVWLEYRRRNDAPRDEESAASLQYDDVNDSDEDDVGTSGSSSSSGFTKRCASLNTMISLLWWMVGFYWVVSGGDILLQDAPRLYWLSVVFLAFDVFFAIFCVVLACLIGIALCCCLPCIIAILYAVAGQEGASESDLSILPKYRFQLLSNEETPGEGGGSMIPMETSNGYSVNERTLSPEDAECCICISSYEDGAELHVLPCNHHFHSTCIVKWLKMNATCPLCKYNILKGNEQV

SEQ ID NO: 33112 - protein, 340 aa, Glycine max
  Clone ID: TF_GmC5691_2.pep
GRVGGILIRSLGFLLDMATFPMALGHYLYIWRLHGMAFHLIDALLFLNIRALLSAIINRIKGFIRLRIALGTLHAALPDVTTEELRAYDDECAICREPMAKAKRLNCNHLFHLACLRSWLDQGLAEMYTCPTCRKPLFAGVPGNETNSDAGTISSDEQLARQISAGLDRPNSARHTMPTGFYPNQTLNTPEGVPWRGAGLDSGWLHSWPNQGVDGAGPSTAIRTVGLGRVQMMMRHLASGGETYAQTTLEDTAWNLWPINPSQASASGSTIPPPGGRLPERTGSLHLRTASQSSNDNVANILAMAETVREVLPHIPDDMIFQDLQRTNSVTVTVNNLLQM

SEQ ID NO: 33113 - protein, 257 aa, Glycine max
  Clone ID: TF_GmC1201_1.pep
VWMAAVLCRARDFRRQRPALTGVGYLLLLVRASVGFALHVVGVYWWYQNDDLMYPLIMLPPKDIPPFWHAIFIIMVNDTLVRQAAMVFKCILLMYYKNSRGRNYRKQGQMLTLVEYLLLLYRALLPTPVWYRFFLNKEYGSLFSSLMTGLYLTFKLTSVVEKVQSFFAAVKALSRKEMHYGAYATSEQVNAAGDLCAICQEKMHAPILLRCKHIFCEDCVSEWFERERTCPLCRALVKPADLRSFGDGSTSLFFQLF

SEQ ID NO: 33114 - protein, 314 aa, Glycine max
  Clone ID: TF_GmC6412_1.pep
MNSDTTSYWCYSCTRFVHIQEQNDVVCPRCHGGFVEKVTAPQSSRQGFRRRRRNAGNHSAFNPVIVLRGPGEDEESSFELYYDGFDGEGLRPLPSTMSEFLLGSGFDRLLEQVSQIEINGLGRAENPPASKAAIESMPTVEITESHVASETICAVCKEAFELGALAREMPCKHLYHSDCILPWLSMRNSCPVCRHELPSEQTAPETRVAGQIEEEAVGLTIWRLPGGGFAVGRFAGESHLPVVYTEMESDGNSNEGSRRISLAVGSGRVRESRGGGFGRIFRNLFGRIGALTRSRSLSTSLFNRRSSRAWVLGN

SEQ ID NO: 33115 - protein, 215 aa, Glycine max
  Clone ID: TF_GmC196244_1.pep
MDGSGHYVSLAQFDDDGISMAKHLESANTMFSFIWWVVGFYWVSADSESLVRDSPLLYWLCIAFLGFDVFFVVFCMALACIVGIAVCDRPSGIIALLYAVADQEGASKEDIEQLSKFKFQRTETNEKHAGNTQGAAGGIMIECDADSPIEHVLSDEDAECCICLSAYDDGVELRKLPCSHHFHCACVDKWLHINATCPLCKYNILKSTSHGQDEV

SEQ ID NO: 33116 - protein, 262 aa, Glycine max
  Clone ID: TF_GmC41583_2.pep
MLELSESHSKNLHFPLTHIILFFTCFKLSKAQSSMEPVPTYITHHSWEPSVVITVGAIIIALLLMGIISIYLRRCAESHIIITTTQTTTTLPCSCAQGINRELLNTFPTLFYSNIKDLKKGNETLECAVCLTDFTDKDALRLLPKCNHVFHPHCIDSWLACHVTCPVCRANLSQESSHVSITVPPHNEEEGSRNTTTNEATQIEQSTSNDVGQVCLGDPTPTSDAAIMYISEEQQQQHSSSEPTFEELDPTILLLLLLTMVA

SEQ ID NO: 33117 - protein, 71 aa, Glycine max
  Clone ID: TF_uC-gmroLIB3258100e08a1.pep
PKITEKALLMGNKCPVCLDKIETKQPVGVVPGCNHPFHLECADTWLSKHPFCPFCRAKLDPSLFSSSQNPC

SEQ ID NO: 33118 - protein, 278 aa, Glycine max
  unsure (1)..(278): unsure at all Xaa locations
  Clone ID: TF_GmC552_1.pep
MWSAYLEKNRVNQQTTKISMTCKREDIWSHGCQHYRRRCRIRAPCCNEIFDCRHCHNEAKNDINIDQKHRHDIPRHQVKQVICSLCGTEQEVQQNCINCGGLYGTSTSVETCKLFDDDISKQQYHCSGCGICRTGGSENFFHCYKCDCCYSTNSEKQSPLCSRXQLHLDCPVCFEYLFISANDVTVMPCGHTXHKSFLNEMREHFQYSCPLCLXSVCDMSKVWEKFDMEIAATRMPEQYQXIKWFWILCNDCGKTSHVQFHFVAQKCPNCKSYNTRQT

SEQ ID NO: 33119 - protein, 139 aa, Glycine max
  Clone ID: TF_GmC552_10.pep
DNFFHCYKCGCCYSTLLKNSHPCVEGAMHHDCPVCFEYLFESRNDVTVMPCGHTIHKSCLNEMREHFQYSCPLCLKSVCDMSKVWEKFDIEIAATPMPEQYQNKMGWILCNDWGKTSHVQFHFVDQKCPNCKSYNTRQT

SEQ ID NO: 33120 - protein, 385 aa, Glycine max
  Clone ID: TF_GmC271926_1.pep
MKIPNTILKLFLFILLNPSQIAIALASIEACLDSVCQTHEPVIRFPFRIEGEQENSCGHPGFSVSCNHNGQTLLNLSYCGEELRIQRINYAAQQLWVNDPNNCLPKRLLSLNLSASPFDAVYRQKFTFFNCSFNLEYLVRRYRPISCLSDSPKYLVFATPSSTVFGHLSSVCDLVATVTVPVQSPFNDRVTSSELSDDLRFSWDSPSCGRCESHGGRCGFKSNETFELDCSLVPSKGISHGARYAIVICIGATALLCCMGVLRCIHSWLRIGNQDGPWANETVPDFEALAGSRPTTVTGLDRPTIESYPKIVLGENRGLPKKGDKTCSICLSEYIPKETVKTIPECGHCFHAQCIDEWLPLNASCPICRTSPRKLPQPRARSSPQ

SEQ ID NO: 33121 - protein, 108 aa, Glycine max
  Clone ID: TF_GmC1196_1.pep
SLLGSSEEKLQCTVCLEDVEVGSEAKEMPCKHKFHGDCIVSWLKLHGSCPVCRFQMPSEDSTLEANVGVGNGDNQNSELVRAGEERPRNGRRNWFPVLQSFNNFLPYP

SEQ ID NO: 33122 - protein, 166 aa, Glycine max
  Clone ID: TF_GmC310374_1.pep
TTQPIPDSSAPTTSGFGMGIGISIGILLLITTITLTSYFCTRSQVPTPPRRRTTSNSNPQFLEPHHTIVDVGLDEATIMNYPKMLYSEAKLRKFDSTSTSCSICLGDYKGSDFLRVLPDCDHVFHLKCIDPWLRLHPTCPLCRTSPIPTPLSTPLAEVVPLATRRD

SEQ ID NO: 33123 - protein, 231 aa, Glycine max
  Clone ID: TF_GmC1470_1.pep
MASGFGESTGRSPPSPSYFNNNNNNDAANFECNICFELAQDPIITLCGHLFCWPCLYKWLHFHSQSRECPVCKALVEEEKLVPLYGRGKSSTDPRSKSIPGDNIPHRPAGQRPETAPPPETNHFHQHGFGFMGGLGGFAPPPMATTRFGNFALSAAFGGFIPSLFNFQLHGFHDAAMYGGGAGFPHGFANTFHGVHAHGFPLRTHQGQQDYYLKKLLLFVVLCVVLAFIWQ

SEQ ID NO: 33124 - protein, 170 aa, Glycine max
  Clone ID: TF_GmC1470_3.pep
MASGFGESTGRSPPSPSYFNNNNNNDAANFECNICFELAQDPIITLCGHLFCWPCLYKWLHFHSQSRECPVCKALVEEEKLVPLYGRGKSSTDPRSKSIPGDNIPHRPAGQRPETAPPPETNHFHQHGFGFMGGLGGFAPPPMATTRFGNFALSAAFGGFIPSLFNFTVA

SEQ ID NO: 33125 - protein, 131 aa, Glycine max
  Clone ID: TF_jC-gmXLIB3563P066aa12a1.pep
MASGFGESTGRSPPSPSYFNNNNNSDAANFECNICFELAQDPIITLCGHLFCWPCLYKWLHFHSQSRECPVCKALVEEEKLVPLYGRGKSSTDPRSKSIPGVNIPHRPAGQRPETAPPPETNHFHQHGFGF

SEQ ID NO: 33126 - protein, 136 aa, Glycine max
  Clone ID: TF_GmC1231_1.pep
ARNSARAPPAQKEAIEALPTVIINENSQCSVCLDDFEVGSEAKEMPCKHRFHSGCILPWLELHSSCPVCRLQLPLDESKQDSDLSRDSRSQREDESIEHDNDEERDGEGRNASGGRRFSFPWPFNGLFSSSNSSSS

SEQ ID NO: 33127 - protein, 113 aa, Glycine max
  unsure (1)..(113): unsure at all Xaa locations
  Clone ID: TF_GmC187_2.pep
TFMRIEPXRAWCVCLPVFIGLQAAILLLQHYLGSRWFIPRQILPEKYSYYRRFDQDTRHATDCVICMTAIDLSQRSNDCMVTPCDHFFHSGCLQRWMDIKMECPTCRRPLPPA

SEQ ID NO: 33128 - protein, 229 aa, Glycine max
  Clone ID: TF_GmC999_4.pep
MGSVCCCLSFDDFEDYVNPNSPVYRNCVCLSCLIQNLLSVYSSIFRRGDAHSIPSSIQGAASITSAASLDNSLSDMYRSPPRPLPYDAEPRYFRSQRDGLVSRREKGSSHSNEETEPLRSDADVDPESLNSGDKWNESACEAGSKEYHSKSSLRLQSTKYSTGVGLVYASSEEEDVCPTCLEEYTKENPKIMTKCSHHFHLGCIYEWMERSDNCPVCGKVMVFDETTFT

SEQ ID NO: 33129 - protein, 87 aa, Glycine max
  Clone ID: TF_GmC1738_4.pep
NEETPGEGGGGSMIPMETSNGYSVNERTLSPEDAECCICISSYEDGAELHVIPCNHHFHYTCIVKWLKMNATCPLCKYNILKGNEQV

SEQ ID NO: 33130 - protein, 199 aa, Glycine max
  Clone ID: TF_GmC249_1.pep
TNGEFPISSFFSSMSSFNPFSPPPPTPYLTNLGFGYSIAIALGVLFLLSTLILSSYLCCRTLRHRNNNRHTPRNNTSDGIVLPRVIFVAEDDDDDATRQNDAVTGLDQAVINSYPKFPYVKEGDYDSTCSICLCEYKDSEMLRMMPECRHYFHLCCLDPWLKLNGSCPVCRNSPMPTPLSTPLQEVVPLSQYADARARR

SEQ ID NO: 33131 - protein, 177 aa, Glycine max
  Clone ID: TF_jC-gmfl02220056h06_FLI.pep
ATTTPYLTNLGFGYSIAIALGVLFLLSTLILSSYLCCRTLRRRNNNNNRRHTPDGVVLPRVIFVPEDEDDDDDDTRQNDVATGLDQAVINSYPKFPFVKEGNYDSTCSICLCEYKDSEMLRMMPECRHYFHLCCLDPWLKLNGSCPVCRNSPMPTPLSTPLQEVVPLSQYADARARR

SEQ ID NO: 33132 - protein, 260 aa, Glycine max
  Clone ID: TF_GmC150616_1.pep
MGDSSAANDHLGESPAVELTGKIMIVVIIIMFFVIVIALCLHLFARNFWWRSPAPQSRSHRRRRFVFSSGPDGGSGLDPAVLSSLPVLVFEGHAQEFKDGLECAVCLSEVVEGEKARLLPKCNHGFHVACIDMWFQSHSTCPLCRNPVASSEESSESPTFPTNVLVWGNQAQISSTGGGGASLEEGSSSSSSASTCDDHGMLVIDIPSEMTSTSLSPEDDVKSPMTGRLRSLKRLLSRDKRFNPSSPTSSPDVQQPGSGS

SEQ ID NO: 33133 - protein, 236 aa, Glycine max
  Clone ID: TF_GmC35324_1.pep
MYSVASTSLTSPLLHDLENFHYSRRLLLHSPYLNQSAKPPRSSHDSSTETYLGDGNFDANVVMVLSVLLCALICSLGLNSIIRCALRCSNFVVSDSVATNNNNNNPPAARVANTGVKKKALKTFTTVSYSAELNLPSLDSECVICLSEFTSGEKVRILPKCNHGFHIRCIDKWLSSHSSCPKCRQCLIETCQKIVGCSTQQASSSQQHVLAVPETIVTIIAPLEPEGLVRNYRELS

SEQ ID NO: 33134 - protein, 242 aa, Glycine max
  Clone ID: TF_GmC23999_3.pep
KYTRSLKVIVLPRIPVIVSQDRSKLRIQRQRRSRSRIQNRMNNPLPTDYRILDLHAVVSHHSITMPSPSADQSQSQPKPNPNLLSLFLKPIIMLLLTSLFFLFLGFAAFLLLNLFLLGGAFHRLRFRPSVTSAPASSIGLPPRDINNLPRFLVANGSATRPDSNCVVCLDAFHNAQWCRKLAACGHVFHRRCVDTWLLKVAACPTCRTPVGFNAGATVHDPPQRSDHLHTCGTDSNALTTLL

SEQ ID NO: 33135 - protein, 108 aa, Glycine max
  unsure (1)..(108): unsure at all Xaa locations
  Clone ID: TF_LIB3242-353-Q1-J1-B10.pep
SHMSSAAAYVEGGNQESCDDACSICLEEFDASDPLSVTTCEHEFHLQCILQWCQRSSYSPMCWHPISLKDPTKXEVDEGVQQRRSLTATPSRNAAVLHHPAFGDIEMQ

SEQ ID NO: 33136 - protein, 453 aa, Glycine max
  Clone ID: TF_700842658_FLI.pep
MAAQKRSFPDAPNDNNRHAKHHHEEAKTEEEEEEEEEEAQQQQQHDEEEEEEDNNYKSDDSPPEDKSEYVFVELLEIRKEVQCPICLGIIKKTRTVMECLHRVCRECIDKSMRLGNNECPACRTHCASRRSLRDDPNYDALIAALYPNIEKYEQEELEFREEDKNRNKQASIAKVVQRQSEALVKRRRDTPGSFVTRSQRNQRNVLSRRQNQGMDNQGSEDNEEENDNNEKDSSSTDERCTELRQRRRKRRTRGRPSQPSSSTASPDGGCIESDMDIRISSRLVSKPQKLTWGRGGFRSHTRHGSGNGSNSKSSRSSRLAKLVDYLHSLNENTDELDVHLILLSLDKQITPSLQQPHLCCRPTLSVKHLCEYVAHQTPLLLEEVEILAVKGCCSTVCDKSFDETSSSDELTTLVIDPSKDELETLQGHESLAGIKSKCISKREHLILAYRRKE

SEQ ID NO: 33137 - protein, 184 aa, Glycine max
  Clone ID: TF_GmC127138_1.pep
MSSSSIPSSPDHFPHLGLGYSIAIALAFLFLLSTLLLSSYLCCRHNRRRLRHTTAAATSDGGIVLPRVIFVAEDEDEDGSVAVGFDQSVINSYPRFQYDRDNARNNNIINTTCSICLCEYKDSEMLRMMPECRHYFHLCCLDSWLKLNGSCPVCRNSPLPTPLSTPLQEVVPLSQYAADRRRNR

SEQ ID NO: 33138 - protein, 384 aa, Glycine max
  unsure (1)..(384): unsure at all Xaa locations
  Clone ID: TF_GmC1149_1.pep
MPVTNTTTPTVAEHIKWRRPRNQFNHHQHPISETDPNPQIPSIIQSTRCKSTISSLLLSTFSNNTSSNNDTPTTFNATAHSKKKSNFSASTFRGLGCTAGASQQVSVPAVIRSSAVQSKTPQNWKAKKTSKKKHKRSSSSSKHKTFHPLGXGSTNSSVRVFSSCFVRPSQQFLLHHPSIPLLIXEENKHFVSSARGKIDVDKITHRERSSYVGRRTETFTFLDSTDPDIFTPRSASDSYGTATYYRHVRDPSSDGFAEIMMLQGSLLMGGQLNSHDHFKDWRLDVDNMSYEQLLELGERIGHVNTGLKEDEMGRNIRKTRLQFWDDTSKHQVDKECSICQEEYEAGNELGRLNCEHIYHFQCIKQWAAQKNFCPVCKQQVAARH

SEQ ID NO: 33139 - protein, 206 aa, Glycine max
  Clone ID: TF_GmC1428_1.pep
MGVPQPPPPSQHLYPQEIQLKLYQAFIFSIPILFSIILVLLFYLFYLKRRASSLSSPPLHILPSTTNSQTTYPYPSQPCRLDLTVQFLDKLPRILFHEDLRTGDSVCCVCLGEFELKEELLQIPYCKHVFHISCISNWLQSNSTCPLCRCSIIPSTKFLNPAPPIISDPTRQGGVSGSSSHILSLPHQQEEVGASTNTTIFQGNDV

SEQ ID NO: 33140 - protein, 305 aa, Glycine max
  Clone ID: TF_GmC552_4.pep
MGEVAVMHSEPLQFDCNDMKHITEKDVYNLLSNEEHILGEESSQSSNDKKINDLRERGYMKCQHYRRRCRIRAPCCDEIFDCRHCHNEAKNNINIDQKHRHDIPRHQVKQVICSLCETEQEVQQNCINCGVCMGKYFCGTCKLFDDDVSKQQYHCSGCGICRTGGCENFFHCHKGGWCYSTQLKNSHPCVEGAMHHDCPVCFEYLFESRNDVTVMPCGHTIHKSCLNEMREHFQYACPLCSKSVCDMSKVWEKFDLEIAATRMPEQYQNKMVWILCNDCGKTSHVQFHFVAQKCPNCKSYNTRQT

SEQ ID NO: 33141 - protein, 349 aa, Glycine max
  Clone ID: TF_GmC481_1.pep
AKESSLPSSLPPPPPSGTRISPAVLFIIVVLAVLFFISGLLHLLVRFLIKHPSSASAQSNNRHQELSTSDALQRQLQQLFHLHDSGLDQAFIDALPVFQYKEIVGLKEPFDCAVCLCEFSEKDKLRLLPMCSHAFHISCIDTWLLSNSTCPLCRGTLLTQGFSVENPIFDFDDLMEDEMCPWNGENGFNTRQKTVVVEESVEKEKGVFPVRLGKFKKLSSVEGGGESEVGETSSSNLDARRCYSMGSYQYVVGNSDLRVALNHDEIGKGQVTRLNKGMELDDGKVSVEEGDVEGKKISSVSKGDSFSVSKIWLWPKKGKLPTSLDGQIGMPMPSFLNTDFPRMRDTEGA

SEQ ID NO: 33142 - protein, 216 aa, Glycine max
  Clone ID: TF_GmC23999_4.pep
YLCSTFRGCSFIHALALFKSIFFLCSIYLLLFFPLTPITMPSPSDHHRPQPKPNPNLLSLFLKPIIMLLLTSLFFLFLGFAAFLLLNLFLLGGAFHRLRFRPSVTTAPTSSNGLPPREINKLPRFRVANGSETRPDSNCVVCLDAFHNAQWCRKLAACGHVFHRTCVDTWLLKVAACPTCRTPVRFNAGTTVHDPPQRFDQFHTCGTDCTALTTLL

SEQ ID NO: 33143 - protein, 387 aa, Glycine max
  Clone ID: TF_GmC24755_1.pep
MATTRSSSEDIVDSTPLLANSAGSSDDLTSGRRFARRQRLRQAAQFLRQASGRRMMREPSMLVREAAAEQLEERQSDWAYSKPVVVLDIVWNLAFVVVAGTVLVLSASEAPGMPLRLWIVGYAMQCVLHMVFVCVEYRRRRRQQPAAASSVQDRVGSSSGNLSVSSREGSASASASAQNVLLGQLDDESTSVAKHLESANTMFSFVWWIIGFYWVSAGGQALAQDSPQLYWLCIIFLGFDVFFVVFCVALACIIGIAVCCCLPCIIALLYAVTDQEGASKEDIEQLSKFKFRRIESNEKLTGTIQGPVGGIMTECQADSPIEHALAEEDAECCICLSSYDDGVELRELPCGHHFHCVCVDKWLYINATCPLCKYNILKSSNLSQEEV

SEQ ID NO: 33144 - protein, 356 aa, Glycine max
  Clone ID: TF_GmC56808_1.pep
THSFVGTRVLNFPDEGDEFDSDTDIDPMHAGLSQWISTDEDNEEEEEEEEEEEEEEDREWELADVYEAEATSHLQIFFTSSPSESRDHINSTESGGMFSQIIRETWHAFEDVDLPHGANFGDYLDARRFEDLLEHLAENDSSRRGAPPAAVSFVNNLPRVVIGKEHENHGELVCAICKDVLAPRTEVNQLPCSHLYHINCILPWLSARNSCPLCRYELPTDDKDYEEGKQNIDSRNVIHERQRIDVTDDSYSDVSDGDEVNGSGQGGIRQRLLSSGSTVDSSATRSGRGRWFFLAAAPIVSLVGIVLVLWLGNNSQNEGSRHLGSHYLSGQNQHAVHAYSSPNQREGRSRGWWCPF

SEQ ID NO: 33145 - protein, 206 aa, Glycine max
  Clone ID: TF_GmC37201_1.pep
MSWRSVRGSRKRKMDFELDLNRDPPLVREEEEEEEEGGPSRHQQHHHHQQEPQTPIVDVDAIDDDVVESSPRSFAQAKSNADERRRVRRRTTIVDLDSEDGTGGVPQNQTIINGDLYVNLANNSSSASENAKKTPEPPKEPEAPKEPFFNCPICMSPLVEEMSTRCGHIFCKNCIRAAISAQAKCPTCRKKVTKNSLIRVFLPATS

SEQ ID NO: 33146 - protein, 300 aa, Glycine max
  Clone ID: TF_GmC1077_1.pep
LARSKSDVQSCAHQEMATAEAEIADMRQKLEDSKRQMCDLSDVLKSKNKQNENYMSEIESIGQAYDDMQTQNQHLLQQITERDDYNIKLVLEGVRARQKQDSLLMEKRVIEHEIQQANISLNVYDVKATRIEDQLKFCLDQLQKLAEDKLQSSVTLENTQRRLSNVRRQSQQVTDMVVEMQSKIGSNRVTRMELQVELEKERFAKKRVEENLEVARRKFTCLKEQNEGFLVTEKLQQELEEYREIIKCSICQDRAKEVVITKCYHLFCYSCIQKVAGSRHRKCPQCGTSFGANDVKSVYL

SEQ ID NO: 33147 - protein, 132 aa, Glycine max
  Clone ID: TF_GmC99_1.pep
MTLKGLVSLVINLIGLAEGTRNNDAPPLPCYMLSSHIQNNKQQSSESASASNFNEDSWCCVCLSRLKAKDEIRVLPCSHKFHKICVNKWLKGRHKTCPLCRFSMGAEEKSHRAEMFTEEMLIWFSSFHVAGM

SEQ ID NO: 33148 - protein, 400 aa, Glycine max
  Clone ID: TF_GmC127181_1.pep
AILLCAFCIFLSNLQSTRGSKQVNCNTLRCGNIDIQFPFGLRGSNQDRGCRYYPVQSFQLSCLHGGTQTILTLPGFGNLTVKSIDYESQSIRVNDPDGCLPKRFLQKWSLSVSDSPFVLNPMIYGTIPFNLTFLRCPSNVTDSSQYPLVPISCLSNNSNYSVIASWSQPIMSSPSLSQQCQVMSRALARLPLLDMPMWPFWPDLNTDLDLVWTEPDCRNCALSGQVCGFSKEKTKTPQVRCFARDSTKGLSRSAKYGLAIGVGIPGLLCLIGISCCICGKLTNRRRSADLPVTISLEPVPFVMGLDGATIDKYPKTLIGESGRLLKPNDNTCAICLSEYQPKETLRSIPECNHYFHADCIDEWLRLNATCPLCRNSPEASSTASFFSLSPTSSSSSRSPQ

SEQ ID NO: 33149 - protein, 245 aa, Glycine max
  Clone ID: TF_GmC4200_1.pep
MEMESKDYAFSGKIMLIAIVVLFIVIIIMLCLHVYVRRRLVNARRRPQLRRSNRPQFVFYMDPAARIALTRRGLHPSVISTLPMFTFSATNNPTECAVCLSEFENGETGRVLPKCNHSFHTECIDMWFQSHATCPLCREPVEAIPERETRSEVAVIVCDTEPVREEVNRSGPVGASSSAAATSLHIENLGCEDGCESESSFRSPVSRILSFKRILSREKKGSVVGVCSSMTELDVEQRGECDSVS

SEQ ID NO: 33150 - protein, 882 aa, Glycine max
  unsure (1)..(882): unsure at all Xaa locations
  Clone ID: TF_GmC25542_1.pep
MHSSCFQAYTCSHYTCPICSKSLGDMAVYFSMLDALLAAEELPEEYRELYQDIDHIMETIQRHFHNEEVQVLPLARKHFSFRRQCELLYQSLCMMPLKLIERVLPWLVGSLTEDQAKTLQGNMQLVAPETDPAPFKLFCEGFCKARNKGLCVSSSALDCCPVQRLSAIEENFVGPSCAFAFAHLIHIARDXLIKXGNNRSVKRNISELHKNEDLPETSEAEDIQKQCCSARSCCVPGLGVSSNNLGLSSLSTAKSLRSLSFCSSAPSLNSSLFIWETESSSCNVGSTQRPIDTIFKFHKAIRKDLEYLDVESGKLSDGDETILRQFNGRFRLLWGLYRAHSNAEDDIVFPALESKEALHNVSHSYMLDHKQEEQLFEDISCVLSEFSVLHEALQMTHMSDNLSESNFGTSDANTSDVIKKYNELATKLQGMCKSIRVTLDQHLFREECELWPLFGRHFTVEEQDKIVGRIIGTTGAEVLQSMLPWVTSALTQDEQNKMMDIWKQATKNTMFNEWLSECWKESRVSTAQTETSARSTSRRGAEYQESLDHNDQMFKPGWKDIFRMNQNELESEIRKVYRDSTLDPRRKAYLVQNLLTSRWIAAQQKSPKALSEGSSNSVEIEGLSPSFQDPEEHVFGCEHYKRNCKLRAACCGKLFTCRFCHDNVSDHSMDRKATSEMMCMRCLNIQPIGPLCITPSCNGFSMAKYYCNICKFFDDERNVYHCPFCNLCRVGQGLGIDYFHCMKCNCCLGIKSSSHKCLEKGLEMNCPICCDDLFTSSATVRALPCGHYMHSACFQAYTCSHYTCPICSKSLGDMAVYFGMLDALLAAEELPEEYKDRCQDILCHDCDRKGTSRFHWLYHKCGFCGSYNTRVIKCETSNSSCS

SEQ ID NO: 33151 - protein, 175 aa, Glycine max
  Clone ID: TF_GmC5791_1.pep
FSPAQREAVEALIQELPSFRLTAVPTNCSECLICLEEFHVGNQVRGLPCAHNFHVECIDEWLRLNVNCPRCRCSVFPNLDLSALSNIRSESEQSSATAVTSRDMTGQTSSQSYLLRLQGPLHPVCVDFAGPAGETDNALENAENGVVPVVTQNMSTRDQATSGEHMPVGLSSSQN

SEQ ID NO: 33152 - protein, 134 aa, Glycine max
  Clone ID: TF_GmC9444_1.pep
MGLSNFPSASEGVLPVLVINTVLSVAVLKNMFRSMLQVVLGGSAAANGSNIEHDESSSSSWERRVSITQYKSLCHSHDIGGTSMAMVECCVCLCRFEANQEVSELPCKHYFHRGCLDKWFDNKHTTCPLCRSID

SEQ ID NO: 33153 - protein, 671 aa, Glycine max
  unsure (1)..(671): unsure at all Xaa locations
  Clone ID: TF_GmC96_3.pep
MEELSAGPLVPAVVKPEPSKGASAAASGGTFPASTSEPDKDFLCPICMQIIKDPFLTACGHSFCYMCIITHLRNKSDCPCCGDYLTNTNLFPNLLLDKLILLKKTSARQISKTASPVEHFRQVLQKGSDVSIKELDTLLSLLAEKKRKMEQEEAERNMQILLDFLHCLRKQKVDELKEVQTDLHFIKEDINAVEKHRMELYRARDRYSVKLQMLDGSGGRKSWHSSMDKNSSGLGCEKTTEGGGLSSGSHTKKNDGKSHISSHGHGIQRRNVITGSDSQYINQSGLALVRKKRVHTQFNDLQECYLQKRRHAADRSHSQQERDISLISREGYTAGLEDFQSDIISFTCNSRLRXLSELRHGDIFHLAKIISSIVYFRDDDLFASAXVSRRIKVVHYSAFMIEPREAHYSDLEKSTHSKRSCFCRNKFGKNQIACNCYDRFVSDXDVIIQKSLIDYKEHXKGVWILVSSXTDPSMLVTGRIDSNVKICFTNQEASVLNIDMKANICCVKYNPGSGNYIAVGSADHHIHYYDLRNISRPVHVFSGHRKAVSYVKFLSNDELASASTDSTLRLWDVKENLPVRTFKGHANEKNFVGLTVSSEYIACGSETNEVFVYHKEISRPLTSHRFGSPDMDDAEDEAGSYFISAVCWKSDRPTILTANSQGTIKVLVLAA

SEQ ID NO: 33154 - protein, 81 aa, Glycine max
  Clone ID: TF_15200544.pep
MKSQKRVLGCCGLVDCAVCLENFKVGDVCRLLPNCSHSFHVQCIDSWILQTPVCPICRTWVHSPVVREQSVVSESLEIVTE

SEQ ID NO: 33155 - protein, 171 aa, Glycine max
  Clone ID: TF_GmC7141_1.pep
LSPRPNLLGTPLPTPTAALIVFLLESDKGSTATETFKGQKMLDSVLLALFLPCLGMSGVFIVYMCLLWYATTRHHQQPPIDGQPVKPVADKGLSALELEKLPKITGKELVLGTECAVCLDEIESEQPARVVPGCNHGFHVQCADTWLSKHPICPVCRTKLDPQIFTSQSPC

SEQ ID NO: 33156 - protein, 185 aa, Glycine max
  Clone ID: TF_GmC23646_1.pep
MLQRRLLETELSMPPSYGGSGGNNTRDTFISDANFDTNMVIILAALLCALICALGLNSIARCALRCGRRFGDETAEQAAARLAGTGLKRRELSRIPVAVYGAAGGENTIPATECPICLGEFEKGDKVRMLPKCNHGFHVRCIDTWLLSHSSCPNCRHSLLEKTSAAPESGSGRRSEVVVVVEQAS

SEQ ID NO: 33157 - protein, 261 aa, Glycine max
  Clone ID: TF_GmC502_1.pep
MQGQRRTIGSFPAIVSMMQGPSSSGTDMSHQSSLNHVQNAVDFRLSDYRGSSGETACLRGTGHNVQSFNGWSTGESSSRLNLINQVNDEGLKSEHGLSSSYNAATEDGLRSEERQFEPNNVIFPVSSNTNLHGNQSRVHPSFLQAYSSTRIEMHDRHREMRLDVDNMSYEELLALEERIGDVSTGLSEDIIIKLMKQRIYVSVMTDSSIDLEPCCICQDEFADGENVGSLDCGHEFHSGCIKQWLMQKNLCPICKTTALAT

SEQ ID NO: 33158 - protein, 232 aa, Glycine max
  Clone ID: TF_GmC1189_1.pep
MDFALNPCPLRSSTFVNFVERVKQLGTLAVSAVIGNIFSAILTFCFALVGTLLGALTGALIGQETESGFIRGAAVGAISGAVFSIEVFESSLVLWQSDESGIGCVLYLIDVIASLLSGRLVRERIGPAMFSAVQSQMGAVETSFDEVQNIFDTGGSKGLSGDLVDKIPKIKITTDNNVDASGDRVSCSVCLQDFMLGETVRSLPHCHHMFHLPCIDKWLFRHGSCPLCRRDL

SEQ ID NO: 33159 - protein, 263 aa, Glycine max
  Clone ID: TF_GmC723_3.pep
MANFTSSSSSSCSPLPLSLTMSHISPPSSSAAFDDSSEDACSICLEPFSTHDPATITSCKHEYHLHCILEWLQRSKECPICWQLLILKDPASQELLNAVEAEKRLSSRTVYSHAFTDSRSPLHRLNNDQDDSDFDEQLTQHLVSAASRARYICRGERQRSPGAGPSEVLVFNSSMHASGMQSTLTTSPSSGVPSTSAFSSVGMVTTNTSSESDMPCKPRVIYSQPSPEKCRRLNTSEIFSFPESFKSKLSAASARCKESISKI

SEQ ID NO: 33160 - protein, 309 aa, Glycine max
  Clone ID: TF_GmC147_1.pep
MSNSRNTHWCYSCRRPVWLGRRDAVCPSCNEGFVHELNDMVHVNPFDLFEMDNNEERDQRLGLMETFSAFMRHQMADRGRSHDIRARTDSNPEHSASFAPLLIFGGHIPFRLSRHGGFEALFNGAPGIGLTQGNTGDYFIGPGLEELFEQLSANNRQGPLPASRSSIDAMPTIKIVQRHLRSDSHCPVCKDKFELGSKARQMPCNHLYHSDCIVPWLVQHNSCPVCRQELPPQGLSSSNGGANGRSRSARVSSSGRESHGRRNPFSFLWPFRSSHSSSNDEATGSSTPTPTIPENSHHHHAGYSGWPFE

SEQ ID NO: 33161 - protein, 335 aa, Glycine max
  Clone ID: TF_GmC761_1.pep
MENDTAAAVNNNTTATATAKAGSGGVKSNNHNLEEEHSNLNGEEQMAEQVEAEEEEDREADDGEGEETGSRQPSRTPFTNLSQVDADLALARTLQEQERAYMMLRMNNDGSDYGSWEGGSYLHDEGDDFDDLHDGTDVDEDEDDDDDEDDDDEEDEDEDAFDVHAHASAGEHDNPTIEFDPDVFSSDEAYARALQEAEEREMAARLLAFAGINDREEEDIEEHGANSQDAWEDVDPDELSYEELLALSEVVGTESRGLSTDTIACLPSVNYKTGSDQHGSHDSCVICRVDYEDGESLTVLSCKHLYHPECINNWLKINKVCPVCSTEVSASGSNL

SEQ ID NO: 33162 - protein, 128 aa, Glycine max
  Clone ID: TF_GmC133_2.pep
MLDSVLLALFLPCLGMSAVFIVYMCLLWYATNHHSDPALPAKPVSDTGISPSQLDKLPRITGKDLLMGNECAVCLDEIGTEQPVRVVPGCNHAFHLECADTWLSKHPLCPLCRAKLDPSLFSSSQNPC

SEQ ID NO: 33163 - protein, 81 aa, Glycine max
  Clone ID: TF_6227772.pep
EDEDCAVCLCIMGETEERIITLRCGHVFHRDCLNTWVGFNNATTCPLCRDSSGKRESGKLFRAEILLLDSCSIKRFSLENN

SEQ ID NO: 33164 - protein, 421 aa, Glycine max
  Clone ID: TF_GmC725_1.pep
MENNAFRDQIMEDNEHEEMPDSFVCCVCLDLLYKPIVLSCGHMCCFWCVYNSMSCLRESQCPVCRNQYYHFPTVCQLLHFLLLKIYTAAYKRRESQTLEEEKKSGFYSPQFDPDTCESQAKFGHSGIPSSSSILNLTSNSCNVGTSECLEQSGSTANEGDEGTIFSNREPDIIGTPAKGKKLPQEELSLQQKLSVADVTCTMCKQLLFHPVVLNCGHVYCQICVINIDDEMLRCKVCQSPHPRGLPKVCLELDHFLEEQFPEEYGQRRDAIELQQIKVKPDTPSSCSLDGGKKPENTDWWSDPDSKVHIGVGCDFCGMFPIIGDRYRCIDCKEKMGFDLCGDCYASRSKLPGRFNQQHTSEHKFKLVQPNIIHNIMLRLATAQLGEGSIDLESIGNIEVTSDGAALFGDGEDNHNDSEAAN

SEQ ID NO: 33165 - protein, 721 aa, Glycine max
  Clone ID: TF_GmC502_2.pep
MQGQRRTVGSFPAIVSMMQGPSSSGTDMNHQSSLNHVQNAVDFCLSDYRGSSGETACLRGTGHNVQSFSGWNTGESSSRLNLINQVNDEGLKSEHGLSSSYNAATENDPLRSEERQFEPNNVIFPVSSNTNLHGNQSRVHPSFLQASSSTRISQNISLDMGHVTNAADRGKGKEAGSSVNANNTSGIDREKTLFGSASCNHTGASSESSGYMAWGDSANSSSSLVNWGPSCKRKALEGSSRQLCSGGSSSTLVQSGNGCWPTDPVDLNASSDLTDSTPIEDIPVTSPPLFQNATNEERQEAPNGFPLISIAENVERPLRNFDRRMSHLQHQESVPLNLPSTGSARHHNHSSLHQAPGSHSINDSLELRLTAGGTSSANSGASLNQSPALRIHSFPWNRTANPRGARSSTSYNSGERAVREDFNLRMFPRDSTEHPMNVPASSGHEPIGWHTPSGNVNNSGGAPPPSWIGSSSNVHSPANRSWIFNHEVPAENMQSVSEFSPWSLFPSISSASGVHNAHSAPSSSGPPSFTQGSSSNQSYARTALVMERRGGDVLSGGPHSLRALTFDNEGRRRLISEIRQVLMAMRRGENLRAEDYMVFDHPFLYHGMAEMHDRHREMRLDVDNMSYEELLALEEHIGDVSTGLNEDVIIKLMKQRIYVRAIIMTDSYTDLEPCCICQEEFSDGENVGSLDCGHEFHSGCIKQWLMQKNLCPICKTTALAT

SEQ ID NO: 33166 - protein, 173 aa, Glycine max
  Clone ID: TF_GmC119902_1.pep
AVDHDTSSEALARQVEAVERLARELQEQLYHDDPFEGRGIDEDLAWDLQRAEALMRATIDSHSISQPRHLPRAIRQPRTRFPENPSRRRAMAQASFSAKISQRLYRSLAPEENIMPGVQVIYHLIHFGILVVNGAVVCYLSHLILSFKVKSKKVEIVIGMLLCSVQSFDTLDI

SEQ ID NO: 33167 - protein, 139 aa, Glycine max
  unsure (1)..(139): unsure at all Xaa locations
  Clone ID: TF_LIB4203-002-R1-K1-G10.pep
MSEELSAATSYTEDDFYCPVCQEVLKTPVRTAACQHVFCRKCFLTAMRESGIHCPLCRGSVTRRERACPERALDLENIMRRFSGSCRCCSKKIKFYRMRHHYKSCKKYQDEYGXFSSVIPNFKISQDSVRSSNRSETSA

SEQ ID NO: 33168 - protein, 172 aa, Glycine max
  Clone ID: TF_GmC1667_1.pep
MGFYAEDPLSGLTIGQAIYEVALMIAVLRWVLCLIFRVINDRRTTQSDETPTPEPCSQMTRDNDSILLLTTFGEIKERLPETEETCAVCLSQLSVEDEVRELMNCYHVFHRECIDRWLEHEHENHSATCPICRAPLLSSSCHHSSATCLPPPQPSWAVERLLYLFGDDLLPC

SEQ ID NO: 33169 - protein, 421 aa, Glycine max
  Clone ID: TF_GmC251_1.pep
SHRAIEQLPGSNTFEVAGGSSNNFGRSSSFMNDARGPHKRKIPKGIRGNSQDFNASSSSSSTAPPNARHANDVAIMDNTQFHIRSLVEVGPHGSEWSRPNESIMVHDHNHLIHGNYLGQHFPPIAPPWLFQQLNSNNNDGHATPWNQSLPMPCVQAPAINGSSLESVSMGLQRYHDPVGNRNGLRFPYHVPVNQQHHSYHHSTLPMQGVRDHSLNFFPTVTTNSFRVPTNPLRNVAIPTQASFEMGPRHVGPAPSSSLRIYRPHRGVVPETTLRHRSLPPMGFLRVNDVALIDEVGNLVDNHRDMRLDIEDMSYEDLIALGERIGNVNTGLSEETITTQLKTKTYLTGATSINMEEEVCDDQGTFSCIICQDEFKNQEKIGVLQCEHEYHADCLRTWLVVKNVCPICKSEALKSTSVSPPT

SEQ ID NO: 33170 - protein, 263 aa, Glycine max
  Clone ID: TF_GM651B23rgnG1.C1.o42.ma.pep
MALSVICSSKGNVLSESNILVVSCVVLNGLASFVIVEGLHDGSKARDVNLGGWLVIEGWMIKPSLFGGTANGDMLVQFKSGTLQKYVSAENGGEMNNLTICVFIIVIASTACVIMFLITLSKILSYYYARRYNVSRSNPPILFDIRGDFPFSDDEEQEQAIRHPIWFIPTEGLQQSIIDSITVCKYRKDEGLAKETLTECLVCLGEFQQEESLRVLPKCNHAFHISCIDTWLRSHKSCPLCRAPIVLDAASLCDINQDIEESI

SEQ ID NO: 33171 - protein, 349 aa, Glycine max
  Clone ID: TF_GmC1719_1.pep
MGNIGSSGSNSRWRHGGGGGSGRRIHPPPPPVMSPPEVTANRFVYPPAATPYHNYPGYYPPPTTMPAPLPAPYDHHHRPAVDPMWVRYPPAAPPAPAPYVEHQKAVTIKNDVNIKKETLRIEPDDENPGCFLVSFTFDATVSGSITILFFAKEGEGCTLTPMKENVLPPVTVNFQQGLGQKFKQPAGTGIDFSTFEESELLKVGDMDVYPVAIKADASSSDHDESKSNETPSSGSSNSQITQAVFEKEKGEFQVKVVKQILWVNGMRYELQEIYGIGNSVESDVDGNDPGKECVICLSEPRDTTVLPCRHMCMCSGCAKVLRFQTNRCPICRQPVERLLEIKVGPEPEE

SEQ ID NO: 33172 - protein, 561 aa, Glycine max
  unsure (1)..(561): unsure at all Xaa locations
  Clone ID: TF_GmC7728_1.pep
VGPPDRIPVASVAGSAAGFRCHVRPPPSLIKSSGPLNEHVAPTVGSGPFLLPSGTANGFLGEETDGRPGCSLDTRRVSCKRKAVERNVGQSSDGGSSSYSQHTDGSTWNTLPTQAYGGISFNRSAPTDQVNARLGLSTGDGSSESIPVSNVARSSGSFHRNFRPRTSPSSQQISVPSTAISSGNVIRSSGVSSPSPILQRFHPVDXSFDLRAVPPVDTMVPQSQPLVIHVPALPRNAQSFRWSGGSSSTNNHSSNSVMCADRNNLPNEEASSRSMPRNIIEYPMFVPATNLRNVVRNPARTSNNANLSIPGNVGSSSRTGSNPAVNPPPASAWVSRPNPQQYPRRLSEYVRRSLFSPGLEAAGSSSNSYTPFRGPPTSSESRGLSSGVNPFERQGDSEFGIPYSLQSLVVAGEGSSRLVSELRNVLGLMRRGGNLRFEDVMILDPSVFSGIADIHDRHRDMRLDVDNMSYEELLALEERIGNVSTGLSEEIVSKLLKKKKYSAEPDSQHEAEPCCVCQEEYKDGDDLGSLDCGHDYHRDCIKQWLMHKNLCPICKTTGLAT

SEQ ID NO: 33173 - protein, 231 aa, Glycine max
  Clone ID: TF_GmC1025_1.pep
MASETEVPDIISSVFERFQQNRDMSLFLPFLFGFSDATPGRNSDDPDHETAPTEAPQRQRIILVNPLTQGMVVIDGGSSLEALFREFTNGKGGRPPASKESIEALPSVEIGEGNEDSECVVCLEEFGVGGVAKEMPCKHRFHGNCIEKWLGMHGSCPVCRYEMPVEEIDWGKKREEEGGERRRSDGGEVWVSFSFNRSSRRNQDHDQADSGDSNDDDGSSSSHGDGAAEES

SEQ ID NO: 33174 - protein, 83 aa, Glycine max
  Clone ID: TF_LIB3029-001-Q1-B1-A5.pep
RIGNVSTGLSEETLSKLLKQRKHSVEKGSETDAESCCVCQDDYGDGTDIGTLDCGHDFHSSCIKQWLMQKNLCPICKTTGLAT

SEQ ID NO: 33175 - protein, 367 aa, Glycine max
  Clone ID: TF_GmC92_1.pep
MDLVSRRYLIYVSQHGSQPQALSPITSPGSSIFHPHQHASSTSFPIIAIAIIGIMATAFLLVSYYIFVIKCCLNWHRIDVLRRFSPSRRREDPPPTYSPATDTRGLDEALIRLIPVTQYKAQQGDDRDFGERRFCECAVCLNEFQEDEKLRVIPNCSHVFHIDCIDVWLQSNANCPLCRTSISLTSRFHIDQLLTLRPSSSSYPHDQTPPRENLIGGDEDFVVIELGSDHDRSQNLQERGNALELPTCPISPSSPRKLLEHRNVQKKKAMKLQKVTSMGDECIDIRAKDDQFFSVQPIRRSFSMDSSGDRRFYLAVQEALRNQNWQVNEVNSIEGCSGIGSRAKRSFFSFGHGSRSRSSVQPVSLDP

SEQ ID NO: 33176 - protein, 106 aa, Glycine max
  Clone ID: TF_uC-gmroLIB3258040h12a1.pep
DIDIEREDECGICMDMNSKIVLPNCNHAMCLKCYREWRTISQSCPFCRDSLKRVNSGDLWVFTDRRDVVDMATVTRENLRRLFMYIDKLPLIVPDSLFDTYDSHIR

SEQ ID NO: 33177 - protein, 234 aa, Glycine max
  Clone ID: TF_GmC127065_1.pep
MSSGATYWCYTCRQPICLARRDHICPYCDEGFLQELDELQGGMEQRGSEPRMGGRYINFGVRRPGSTPLPESWTRGVFIFPNQEVAADREGFFEQHITNDPLGASQSSIDAMPTIKITHEHLYSNPKCSVCIERFEVGSEARKMPCDHIYHSDCIVPWLVHHNSCPVCRGKLPPEGHVSSRGSQIWRGRNVNGNSENDIYRGRENRQFNDGWRNLLSFLNFCGQSFLLIQILNS

SEQ ID NO: 33178 - protein, 195 aa, Glycine max
  Clone ID: TF_GmC1797_1.pep
MMPPSQPPHWAPSPTPILSKSFLPPTSNSPAVDFTPPLIAMVVVVAAAFLVVTYSRLIARHLRPPVHRLLRRFRRRRFLPSSVGDLESLPYDSPFDGPHVFSPYGLDETVIKTIPFSLYTAKYDARFDESRYDCAVCLLEFEDEDYVRTLPVCSHTFHVDCIDAWLRSHANCPLCRAGVLCTDSPFTPMMAALEP

SEQ ID NO: 33179 - protein, 156 aa, Glycine max
  Clone ID: TF_GmC520291_1.pep
MTSVCEFLYQLYAKTIVLLTYMLIELILIIQYLKSDTRPISTAQYLNFIEEKNPTIQFTRRLKAENIDCRVCLSEFQEGEKVRNLNCRHTFHKDCLDQWLQQYCATCPLCRNKVLPDDVVANHNLLQNQAEYDGNDDQLIFLLSALRGGSTLHRYL

SEQ ID NO: 33180 - protein, 462 aa, Glycine max
  Clone ID: TF_GmC7706_1.pep
MDQMSQQRHGYFHSESIHFRGSNISPPNVCTLVTASGHGTNLDSHYLLDAYDNGMMYGMTQYNGVQHQHNLDMGVPAAANIYYSSMNPSSGTAASLNAEVRRGNYQYFNASASSTVAPPNARHTENGIPSLPHCTSWSRSGESMMVRDPNRITQGNYLSQHFQPAAPPPWLDQQLNSNNNDGHALPWHQSLPMPYVQAPSANGSSLEKCKNGGHRFPHPPLVNPHYHSFHHQTQPVQEMRGHSINFHPPPPVTAPSYRVPTNASRSSSIFIQDAIEMGARHVGAAPLAGSHIYRPHRGSTHETTLRHRNLPPVTFLQVDQVSLERFQPSFFLQVDDVTLLVDHHNDMRLDIEDMSYEELLALGERIGKVNTGLSEEMITSQMKTKSYLLLATNAINLEEAASEEQETDSCIICQDEYKNQEKIGILQCGHEYHADCLKKWLLVKNVCPVCKSEALTPGEKCV

SEQ ID NO: 33181 - protein, 133 aa, Glycine max
  Clone ID: TF_LIB4391-049-R1-K1-C7.pep
MENNAFRDRILEDNEHEEIPDSFVCCVCLDLLYKPIVLSCGHICCFWCVYNSMNCLRESQCPVCRNQYYHFPTVCQLLHFLLLKIYTAAYKRRENQTLEEEKQSGFYSPQFDPDTCESQAKFGHSGIPSSSSI

SEQ ID NO: 33182 - protein, 205 aa, Glycine max
  Clone ID: TF_GmC243_1.pep
MSSRAGKGPAVRSYRRRKTALDLDLNRVPAGENREQEGPSTQSVPREVQVEQQQQATQPPMIDVEAIDDDVVECTPRAFAEAKNNSRRVRRRTIVDVDLEDQTRRNKRRRELPNLIINCDKYINLEGGSSSMEQSFKKPPEPPKELVFNCPICMGPMVHEMSTRCGHIFCKDCIKAAISAQGKCPTCRKKVVAKDLIRVYLPSTS

SEQ ID NO: 33183 - protein, 342 aa, Glycine max
  Clone ID: TF_GmC285_1.pep
MADVTTYLRHHRDPDPDPDDDDQTLIPFPYWDLDFDFDPEFPTNTFSFTDRENQINFVMDLFHQRVEQSQLTDPLSNDAVFGVIDGIDLGFPAADDFFIGRRFSVGSDESDGGHSHSHAGIDDGVLGFCAHSDEDYNENDDVASIPLCWDALQLEDNNNNYDDFEWEEVIDERDVLSMLDDTVSVNLGIEEETAAAAAEEEEAESEVSILEWQVLLNSNNLEGPNSEPYFGDNEDFVYTADYEMMLGQFNDDAFNGKPPASASVVRNLPSVVVTEADVVCAVCKDEFGVGEGVKVLPCSHRYHEDCIVPWLGIRNTCPVCRYEFPTDDADYERRKAQRSVVM

SEQ ID NO: 33184 - protein, 232 aa, Glycine max
  Clone ID: TF_GmC6834_1.pep
MAFQHYISRDLKTIPNAATETENSNGCFDCNICLDFAHEPVVTLCGHLYCWPCIYKWLHVQSDSLAPDEHPQCPVCKADISNSTMVPLYGRGHAATAEGKTSSCDVFIPPRPSASCVQALLATSSQRGQHLPYRNPYQGHYFSSHPYQEEDDATSQMLNLGSHHHPVTGMFGEMVYARVFGNPENLYAYPNSYQLMGSATPRLRRQEMQAHKSLNRISIFLFCCFLLCLVVF

SEQ ID NO: 33185 - protein, 168 aa, Glycine max
  Clone ID: TF_GmC12407_1.pep
MAETPSPSESPTASFGPIISNGQVGGFDWIVLVAAILCAFVCALGLNTMLQCVFQCACRVLTEPRQWIASRRLNSGLKKKEMVALPTSTYTTTHSAAASSSSSPNSSSCVICLAEFSDGDPIRFLPKCNHYFHVVCIDKWLLSHSSCPTCRHLLKSNDSLHSLHIVIA

SEQ ID NO: 33186 - protein, 55 aa, Glycine max
  Clone ID: TF_LIB4198-005-Q1-N1-F12.pep
GVVEYNCCVCMVRHKGAAFIPCGHTFCRMCSREIWVSRGNCPLCTNLILEILDIF

SEQ ID NO: 33187 - protein, 330 aa, Glycine max
  Clone ID: TF_GmC37342_1.pep
MEDSDQPAKSAENQQTEQVCSFFRKPVNKKNLRKRTIEIEDNEEDSNNETSLLHIQKKTLKADNKLYFSTGSSKSSASAEPSEESGKTVFQFESSKEIQVQHDSKATAILETETEFSKDARAIRERALKQAEESLKGKSASSEDKKLYKGMNSYKDYKAGFRREQTIASEKAGGSHGPLRASAHIRVSARFDYQPDICKDYKETGYCGYGDSCKFMHDRGDYKSGWQMEKEWEEAEKARKMRLAAGEDADEEEGANLTDEDDEDSLPFACFICRNSFVDPVVTKCKHYFCEHCALKHHSKNKKCFVCNQPTLGIFNVAHEIRRKMAEDKS

SEQ ID NO: 33188 - protein, 136 aa, Glycine max
  Clone ID: TF_GmC1096_1.pep
MLSKYLAPIYTHLKWVLDFVLYYPFYMLYDSHPPINLGTELSTFHYEFSSGSEEHVDCAVCLSKFGEGDEVIRVMRCEHVFHKGCLDRWVGFENATCPLCRGSLTPKRPITNSGAEVVLFQFCSVQKCNDETWWLR

SEQ ID NO: 33189 - protein, 202 aa, Glycine max
  Clone ID: TF_GmC257111_1.pep
MEGEEGKQSSQKNPYVELEEVDFDFILAMSMQEQEREFTMLSTIESESDEYLSDSSIDNDDDGDPDFIASQEFETDLRFLEGEGSDDDDEDMEMEEDEIDPDELSYEELMELEEFIGEETRGLSANEISLCLYPYTCQCAESKSGIDRCVICQVEYEEGEALVALQCEHPYHSDCIRKWLQIKKVCPICGNEVSTPNLASNP

SEQ ID NO: 33190 - protein, 58 aa, Glycine max
  Clone ID: TF_GmC266_2.pep
KVKKLIIKDPECCICLAKYKDKEEVRQLPCSHMFHLKCVDQWLKITSCCPLCKQGLER

SEQ ID NO: 33191 - protein, 213 aa, Glycine max
  unsure (1)..(213): unsure at all Xaa locations
  Clone ID: TF_LIB4167-008-Q1-K1-E9.pep
MVDSGSDFAGIICSICYEPLNPINEDLQSVSICGHVFHELCLQQWFEYSSKGKKHTCPICKQGCRASDACRLYFQSVGDANNSVKPSKCFELEEDAGVLRREVKRLEVKVSGLNSQVEGQTKELEGLNEELCTCKEQAKIETAXKNEALNQKASIQFQLQMKSEELEKSTXECFRLKERNMALAKELAXIKIVSDLDIDERRVXKLATLGNGA

SEQ ID NO: 33192 - protein, 57 aa, Glycine max
  Clone ID: TF_uC-gmflLIB3275009b02a1.pep
ICYVLICLQECCICLAKYKDKEEVRQLPCSHMFHLKCVDQWLKITSCCPLCKQGLER

SEQ ID NO: 33193 - protein, 161 aa, Glycine max
  Clone ID: TF_GmC80819_1.pep
MGFPVGYSELLFPKLLLHILSLLGLLRKLICSLLRFMGLHDFLEPDIAWAETQTRVPEEFESVSATLIREILPVVKFRELVDPPETCAVCLSEFEENDEIRRLANCRHIFHRGCLDRWMGYDQRTCPLCRTAFIPDEMQGAFIERLWAASGIAEYPHVAPF

SEQ ID NO: 33194 - protein, 156 aa, Glycine max
  Clone ID: TF_LIB5118-038-A1-PF1-E2.pep
MGFPVGYSELLFPKLLLHILSLLGLLRKLICSLLRFMGLHDFLEPDIAWAETQTRVPEEFESVSATLIREILPVVKFRELVDPPETCAVCLSEFEENDEIRRLANCRHIFHRGCLDRWMGYDQRTCPLCRTAFIPDEMQGAFIQRLWAASGIADPL

SEQ ID NO: 33195 - protein, 234 aa, Glycine max
  Clone ID: TF_GmC1513_1.pep
MGSMGNSNPNLNPNPNPNPWTPKDCSEGICSIYCPQWCYKVYSPPPPILLGDGDDDPSGFEFSPLIVAVIGILASTFILVTYYTIISRFCRRRNNTNDSTEDDGNSELARVSSSANSGLDEALIKSITVCKYNKRGGLVEGHDCSVCLIEFQENENLRLLPKCNHAFHLPCIDTWLKSHATCPLCRSSVTACPNPNPNSSMEPPPRVIVNALGHQLRSNHVVVVESSEEQQKDG

SEQ ID NO: 33196 - protein, 236 aa, Glycine max
  Clone ID: TF_GmC154097_1.pep
MPITNNTSHTMTNNRFSGMIETVAMCKQLCFGGSALGLFTKIIKKVLFALFTCILALGGSIVGTIAGGIKGQTTEAGFLDGAGKGAITGAIAALELINFDAFDEPISKVALLSSLLNGKIFMEWICPAVARLYQLHVTVNTLETIYQEVSDIYDIRGVRGIPHNVILKLPFQPFNSRKMLKSYNMSCCSICFQDFEDGELVRILPKCDHLFHLQCIDKWLVQQGSCPMCRTYVPES

SEQ ID NO: 33197 - protein, 247 aa, Glycine max
  Clone ID: TF_GmC2571_2.pep
MYIASMGRSFKDSLKLLEADIHHANTLASDFPREYDGACLQMRMSYSPAAHLFLFLVQWTDCNLAGALGLLRILIYKVYADGTTTMSTHERKASIREFYAIIYPSLVQLQKSVADTEDKKQKAVCMERYRKRDDEEHRQPSDIDIEREEECGICMEMNSKIVLPDCNHVMCLTCYHEWRTRSQSCPFCRNSLKRVNSGDLWVFTDNRDVVDMATATRENLRRLFMYIDKLPLVIPDFLFDTYDSHLR

SEQ ID NO: 33198 - protein, 284 aa, Glycine max
  Clone ID: TF_GmC907_1.pep
MAEDGNNNDVPLHKFKDSNPNPEEFDAKGYSLSGKIMLSAIILLFFVVVLMLCLHIYARWYLRRARRRQLRRQRELRRTQLVFYNDDATPAAVSRGLDAAILATLPVFTFDPEKTGPECAVCLSEFEPGETGRVLPKCNHSFHIECIDMWFHSHDTCPLCRAPVERAPEPEVVVITVPDPVSETGSGENENRTGSSSSSSSVGLSKPKPSLVGVTIEVPPRDENFQNELQPSCDSSSSFRSPMSRMLSFTRMLGREKKGNVSPSSCGGGDCSSAAERGEREETQ

SEQ ID NO: 33199 - protein, 240 aa, Glycine max
  unsure (1)..(240): unsure at all Xaa locations
  Clone ID: TF_GmC759_2.pep
MALDHFEESVHQKGNWKSSSEIIADSGRNASGSFDCNICLECVQDPVVTLCGHLYCWPCIYKWLHFQSTSLDNEEQQKPQCPVCKSEVSQSSLVPLYGRGQTTIPSKGKPHQVGTVIPQRPHGPRTHXLXSVSQPISQSYHPYSNPYHPQQHFNSIPSGYTSPMIRTTGSIDNTFGIFGEMIYARVFGNHVSNIHTYANSYNLSGTSNPRMRRHLMQVDKSLSRISCFLLCCLVLCLLLF

SEQ ID NO: 33200 - protein, 390 aa, Glycine max
  Clone ID: TF_GmC324_2.pep
QSLILLTIGKAPARTGTESQFRPRPTPSIPKMNNPNGGICFLLFLFLFPFAAAQPATNQNQSYYNKFSPSMAIIIVILIAALFLMGFFSIYIRHCSDSPSASIRNLAAATGRSRRGTRGLEQAVIDTFPTLEYSAVKIHKLGKGTLECAVCLNEFEDTETLRLIPKCDHVFHPECIDEWLASHTTCPVCRANLVPQPGESVHGIPILNAPEDIEAQHEAQNDLVEPEQQQQDPKPPVPTEPQVLSLNQTLNRNRTRGSRSGRPRRFPRSHSTGHSLVLPGEDTERFTLRLPEEVRKQILQNPQLHRARSLVILPREGSSRRGYRTGEGSSRGRSSRRLDRGFKSDRWVFTMAPPFLVRASSIRSPRVANNGGEGTSAAASLPPPPAVESV

SEQ ID NO: 33201 - protein, 394 aa, Glycine max
  Clone ID: TF_GmC166328_1.pep
MGWGRLGRHGSDSVDGAVAGPSTSATEPRRFPLAAQPEMMRAAEKDDQYASFVYEACRDAFRHLFGTRVAVAYQNETKLLGQMLYYVLTTGSGQQTLGEEYCDITQVAGPYGLPPTPARRALFVVYQTAIPYIAERISSRIASRGIVLADYESAEGFGENAHRSHSAQISGTSPSSSSGQSVTTLSRLKGKMSAFWLHLVQRWPTMLPFVRELLQLVLRANLMLFYFEGLYYHISKRAAGIRYVFIGKASNQRPRYQILGVFLLIQLCIIAAEGLRRRNLTSITGSVHQASFATHDRSAGHGLPVLNEEGNLATPDIDKRSWVSESSSSEYHATSGVSKCTLCLSNRQHPTATSCGHVFCWNCITEWCNEKPECPLCRTPITHSSLVCVYHSDF

SEQ ID NO: 33202 - protein, 144 aa, Glycine max
  Clone ID: TF_GmC25364_1.pep
MASIRAFFTAIAFVAQSFQNYMIQSLHKLYKHYGYAAEVKDNEEKESDYCSVCLSQICKGEKAKSLPVCNHRYHVDCIGAWLKNHTTCPLCRNNITDHITQKHKQVKSLGESLFNLIQSFSDLLVAILYMMLPSTITESFPLVH

SEQ ID NO: 33203 - protein, 204 aa, Glycine max
  unsure (1)..(204): unsure at all Xaa locations
  Clone ID: TF_GmC1100_1.pep
DKLRDELSCAICLEICFEPSTTPCGHSFCRKCLRSAADKCGKKCPKCRQLISNGRPCTVNTVLXNTIQLLFPQEVEARKEASALNTNLRNDRRQPFRGASTTTSSTQQDEDAALARMLQRQIDEQRSPGTTRTRFARLRARRGGVSTSQHEDAALALRMRREEFMQTYRGSSQSSRLPSSLLAREKLRAMVSRAMNRREDLRQG

SEQ ID NO: 33204 - protein, 35 aa, Glycine max
  Clone ID: TF_LIB4281-017-R1-K1-D11.pep
RDGNNMRVLPCHHEFHRTCIDKWLKEIHRYVKIGI

SEQ ID NO: 33205 - protein, 274 aa, Glycine max
  Clone ID: TF_GmC836_1.pep
MSFVFRGTRADIENGFPGFIPERRALRVHATRPSNSNSLTFLVTVLLLFMILNSHQMSPNFLLWLVLGVFLMATMLRMYATCQQLQAQAQAHAAAASGILGHTELRLHMPPSIALASRGRLQGLRLQLALLDREFDDLDYETLRALDSDNVSTAPSMTEEEINALPVHKYKVSGPQCGGSSMQQASSSTPAEKKQDNSNAVGSMKASDDDLTCSVCLEQVNVGDVLRSLPCLHQFHANCIDPWLRQQGTCPVCKFRAGSGWSDNGHNDIIADMV

SEQ ID NO: 33206 - protein, 149 aa, Glycine max
  Clone ID: TF_GmC836_3.pep
FNCALLVRKFDDLDYEPLRALDSDNVSTAPSMREEEINALPVHKYKVSGPQCGGSSMQQASSSAPAEKKQDNSNAVGSMKASDDDLSCSVCLEQVNVGDVLRSLPCLHQFHANCIDPWLRQQGTCPVCKFRAGSGWSDNGHNDIIADMV

SEQ ID NO: 33207 - protein, 343 aa, Glycine max
  Clone ID: TF_GmC41583_1.pep
MHFHFHLTHIIFSLIFNLSKAQSSMEPVPAYITHHSWEPSVAITVAAIIFALLLMAIISVYLRRCAQSHIIITTTTLPCSCSQGINKDLLNTFPTLFYSNIKDLNKANQTLECAVCLTDFTHKDSLRLLPKCNHVFHPHCIDSWLTSHVTCPVCRANLSQESSCHVSITVPPHGEEGSLGNMTTTTTTTEATQVEQRPSNDINQDCVGDPTSTSDTTKIIYISEEQHSSSELACEVELGSKTNVRNSTITNIGDGVVASERNLSRSNSTGHSLVEEQGKGVERYTLRLPEDVRRYILVNHGRSVQRSASVKGGCWSDSEESYVGKRVEKRWVICTPPFVAQHD

SEQ ID NO: 33208 - protein, 103 aa, Glycine max
  Clone ID: TF_GmC342_4.pep
GDMRLDVDNMSYEELLALEERIGNVSTGLSEETLSKLLKQRKHSVEKGSETDAEPCCVCQEDYGDGNDIGTLDCGHDFHSSCIKQWLMQKNLCPICKTTGLAT

SEQ ID NO: 33209 - protein, 207 aa, Glycine max
  Clone ID: TF_GmC871_2.pep
MADPKAYWCHECDMSVSLTLPPSPLLCPHCHTHFLELMDSPTLSQNDTESSLFDVVFQDALLLLNPPSSKPRPLPSLHVTPSLLSSLDPNGVVRCAVCKDQITPHAEAKQLPCKHLYHSDCITPWLELHASCPLCRFRLEEEEEEGGDGVMTKIRREIIARLTVLTEEDFYGLRTTLNHIASRHALIQENENRGAQIGETQGGDSAC

SEQ ID NO: 33210 - protein, 202 aa, Glycine max
  Clone ID: TF_GmC127299_1.pep
MRRRTNYSPIPSPLHQPVPLSIPWVPAINDRDHMYLNLAPIIIIVIAGTTCIIFFLITLFKILRYYYPNRYNVSRSNPPILFDIRGDSPFSDDEEHDQAIRHPIWFIPTEGLQQSIIDSITVYKYRKDEGLVKETECLVCLGEFQQEESLRVLPKCNHAFHIPCIDTWLRSHKSCPLCRAPIVLDVATVLVVAPSLPHMFLT

SEQ ID NO: 33211 - protein, 359 aa, Glycine max
  Clone ID: TF_GmC723_1.pep
MANFTSFSSSLSHLLPLSSPSSSAAFDDSSEDSCSICLEPFSVHDPSTVTCCKHEYHLHCIIEWSQRSKECPICWQSLALKDPASQELLAAVEDEKCMRSRNIANSRAPLGQLNESHDDSCSDDSDFDDQIMKRLVSAARRAHFVQRQERKRSPSAGPSEALGVNSSMHVSEVQTTLTTSSSGGSLPASGVPSTVSIQPPALNTTPESARRPNTSEISFPESFKSKFSAASARYKESISKSTLGLKEKLLAHNVSVKELSKGVQREMNAGIAGVARMIERLDLSSKRSSAPLIAVHSVATSDFPSSGKSVEENGIGGSPSKENGGAVHDVSSDVPPLVTNMQSFRTKTPPFLQSGHGMV

SEQ ID NO: 33212 - protein, 263 aa, Glycine max
  Clone ID: TF_GmC12959_3.pep
MASLGSPSSFWCYRCNRIVRVPQNHAVLLCPDCNSGFLEELQTPPHSRRSTRGGGGSPFNPVIVLRNANDVVSPETRNFELYYNDAVSGSSGPSSLRPLPQGVSEFLMGSGFDNVLDQLDAAAGGAGALPPTAASKAAIESMPVVKILASHTYAESHCAVCMENFEINCDAREMPGGHVYHSECIVPWLSVRNSCPVCRHEVPSDEVEESNNNTVGLTIWRLAEGGFAVGRFIGGRELPLVYTEMDGGFNGANGVPRRVAWDS

SEQ ID NO: 33213 - protein, 173 aa, Glycine max
  unsure (1)..(173): unsure at all Xaa locations
  Clone ID: TF_GmC43458_1.pep
DTNVVMIHSVLLCAVIYSLGLNSIIKCVLRCSIIVINNNDPSSSSVSNNKPSPRLANTGIKKKVLKTFPTVSYSTEMKLPGLDIXCVICLSEFANGDKVRILPKCNHGFHVRCIDKWLSSHSSCPKCRQCLIETCKKIVGSQIQPVPPVPESTIIRIQPLEPEGLERNYREVC

SEQ ID NO: 33214 - protein, 439 aa, Glycine max
  Clone ID: TF_GmC258_1.pep
MAEPHSTAAILPPSTARLEETPSGSSQTPLRSGRGGWSIVDGSFAIVRDNTCSCFVVVFSLWFFVSMTMILGVYGSMTIVLGPKSSIVFQPSPVFVQSVKVENLKANPGPGPILYGTYRYPPLDVVTTWGESINVSLPSGSYKEWKYYLNCGSSINISYHVSSKSSSVFLIIAEGDVSLTRWLEDPTEPNTTLSWNVIHGTGMITQDIFWSSSYYVALGNLDEDVEVALNLSIRASLHNTTNAFYKCDLANGPCSLNLLFSDGSAAVLVTPGPQQNASNEWYVKLSYGPRWVTYIFGIGGLTLLVFGAFNFLNKLQCAHEDRAGVRSEGTERQRAPLLPHKDDDLSSWGSSYESLPQDEKDLGFLPGGPIDGKTLVDGETSNNTRHLCAICFDAPRDCFFLPCGHCVACFACGTRIAEAAGTCPVCRRNMKKVRKIFTV

SEQ ID NO: 33215 - protein, 375 aa, Glycine max
  Clone ID: TF_GmC121969_1.pep
LKSLANKCAEQVLEIKSLKTLTEKLQKENQELEFVLDMHGLENYDKRYSEVRESESKAHSQAEMLKNALDEHSLELRVKAANEAEAACEQRLSAAEAEIEDLRSKLDASERDILELTEAVKVKDAEAEAYISEIETIGQAYEDMQTQNQNLLNQVIERDDYNIKLVSDSVKTKQAHNTLMSQKQALAKQLQQINTSIENSKTRITHSEEQMKAILSDAIKCNQEEKHLAVTLEFAKWELADAEKELKLLKSAVSSSEKEYDQIQKDTEAIEMELESERSLRKKLEEELRELNCKIDELTSETGETTIQKLEKEIRICKNMIKCTVCTDRPKEVVIVKCYHLFCNPCIQRNLELRHRKCPACGTAFGQSDVRFVKI

SEQ ID NO: 33216 - protein, 214 aa, Glycine max
  Clone ID: TF_GmC67144_1.pep
MSLPQTATSPPPHLYPQELQLKLYQTFIFSIPILFSIILFLLFYLFYLKRRASSLSSTPHLLPRTIANPPTTSPYHSSPCRLDLTLHFLDKLPRILFDEDLLARDSLCCVCLGEFELKEELVQIPYCKHVFHLECIHHWLQSNSTCPLCRCSIIPTTKFLNPAPPINIISTDPPQQHGAIISDFPLQILSLPPQPQDHQEVVGASSNAANLSRE

SEQ ID NO: 33217 - protein, 232 aa, Glycine max
  unsure (1)..(232): unsure at all Xaa locations
  Clone ID: TF_GmC96_2.pep
MEELSAGPLVPAVVKPEASKGAAVAADTSEGXASGGTFPASTSEPDKDFLCPICMQIIKDAFLTACGHSFCYMCIITHLRNKSDCPCCGHYLTNTNLFPNFLLDKLLKKTSARQISKTASPVEHFRQALQKGCDVSIKELDTLLSLLAEKKRKMEQEEAERNMQILLDFLHCLRKQKVDELNEVQTDLQFIKEDINAVEKHRMELYRARXRYSXKLRMLDDSGGRKSWHSSM

SEQ ID NO: 33218 - protein, 140 aa, Glycine max
  Clone ID: TF_GmC57441_2.pep
PSPEEDVFPLVICAETTSNSVIDASPHMQITQAVLEKSNGIGPFQVKVVRQILWIDDIRYELRELYGIGSSTVADFDDNDPGKECVICMTEPKDTAVLPCRHMCMCGDCAKALRLQSNKCPICRQPIEELIEIKINNGNE

SEQ ID NO: 33219 - protein, 221 aa, Glycine max
  Clone ID: TF_GmC342_3.pep
ICSSRFSPSSDAIGSPSHNYSSLRSGLSTSEPRALSSGSGANPRSASWLERQGDSEFGIPYSLRTLAVASEGGSSRLVSELRNVLGLMRRGGNVRFEDVVILDHQSFLSGIADVRDRHRDMRLDVDNMSYEELLALEERIGNVSTGLSEETLLKHLKQRKHSAEKGPQIDAEPCCVCQEDYGDEDDIGTLDCGHDFHSSCIKQWLMHKNLCPICKTTGLAT

SEQ ID NO: 33220 - protein, 229 aa, Glycine max
  Clone ID: TF_GmC23452_1.pep
MISSGINLVMTVIGFAVSTMFIVFVCTRLICARIHLNAARRSFPIASRSNLSMMERGCHGLERVTVAKFPTKKYSDKFFAAAENSQCTVCLSEYQGEDMLRILPYCGHSFHVTCIDLWLQQNSTCPVCRISLREFPDRKRLMQPLFSSALQPHYDIESFDNRHYHCMIADNGLSSRTPDNHAVNPIEEDHFPSEGDGAVAMDNITCLSEGDFIKDEGKKHVESPSNFRI

SEQ ID NO: 33221 - protein, 129 aa, Glycine max
  Clone ID: TF_GmC170148_2.pep
CNCCMSKKLVDHICREKGLETNCPICCDFLFTSSESVRALPCGHFMHSACFQAYTCSHYICPICSKSMGDMSVYFDMLDALLASEELPEEYRNQCQDILCNDCHEKGTAPFHWLYHKCGFCGSYNTRLI

SEQ ID NO: 33222 - protein, 331 aa, Glycine max
  unsure (1)..(331): unsure at all Xaa locations
  Clone ID: TF_GmC1361_1.pep
MEGSVNERLHFGKMGYGCNHYRRRCRIRAPCCNEIYSCRHCHNDAASLLKNPFDRHELVRQDVKQVVCSLYAIYLPISDTGTISIEEIAELEHHVAMISTYDVIFVPSHCADXRPALLGTNLSGHDVQHVVFLVCDTEQPVAQVCTNCGVKMGEYFCKICKFFDDDTGKKQFHCDDCGICRLGGRENYSHCSKCGCCYSTSLRDNHLCVENSMRHHCPICYEYLFDSLKDIAVMKCGHTMHSECYLEMLKRDKYCCPICSKSVMDMSKAWKRIDEEIEATVMPDDYRYRKVWILCNDCNDTTEVYFHILGQKCGHCSSYNTRAIAPPVLSQ

SEQ ID NO: 33223 - protein, 251 aa, Glycine max
  unsure (1)..(251): unsure at all Xaa locations
  Clone ID: TF_GmC1701_1.pep
PAAIEVRNHVSPEPEPESEEDSSCCCPICLGPFLQLSYLDKCFHKFCFNCILRWTKVVAGKHRSPPSSVKCPLCKFYLIKXHRYRLQCYYTEQGFLDDIFNISQYWRSLKYNQPNCWLENWLRREIQALIQEEDVDIILHHILAVVKAALWTRREQKSHMNAPEKKQEEFKMSVSEAARPFLAARTDRFVYEIQLFLASGMNIEAYDAAYIQRLGWSSPGVNTEVSHSELVDRSTVIPYMHLFDGDFDENE

SEQ ID NO: 33224 - protein, 196 aa, Glycine max
  Clone ID: TF_GmC122884_1.pep
MEFWNRRLLLQNEDVPLSMPPLSHTHTKHATNASSSSPPQSSAFQFQSPLQVSIPPVFSSSVAYVFLILFTTFFFVGFVFLYFRQFASDAAAAGSYRRRWEEGAAAAAEAKKCLPVVAHCGEGCAECAICLEELREGDAVKMIPYCKHVFHPHCIDTWLDKHVTCAVCRCSELLCGEEVVGSVSARRQEEVVLNLD

SEQ ID NO: 33225 - protein, 238 aa, Glycine max
  Clone ID: TF_GmC938_1.pep
MSSGGGGGKPFFCHVCSQRITCSDESEPFCPMCMESFVEECNPNNPNPNLFPDSDESSDPELPFHRFSLLPLLLSSVSRSRSEPDVFDPMVFLQNHLQDLRADGANIQVDFDHPSNENQGFRLANIGDYFMGPGLEQFIQQLADNDPNRYGTPPAAKDAVENLPTVTVDDDLLNSELNQCAVCQDEFEKGSKVTQMPCKHAYHGDCLIPWLRLHNSCPVCRYELPTDDADYENEVSRW

SEQ ID NO: 33226 - protein, 184 aa, Glycine max
  unsure (1)..(184): unsure at all Xaa locations
  Clone ID: TF_GmC10535_2.pep
MGGCCCSARKPHLQGAPVYYYCPPTFEERESLTSNDGLNASVNAGFLIGLNLEASMPDTFQPPPVPLPYDMVLGGSASTDSESGRETVSSFETSITREDVEESDCKAQANSALTSPKKAQLPKSNVTQELVTEEEDVCPICLEEFDVENPRNLTKCEHHFHLSCILEXLERSDSCPICDQEMIF

SEQ ID NO: 33227 - protein, 258 aa, Glycine max
  Clone ID: TF_GmC260_1.pep
MAMIPYHLCRLPYQDSLKALEADIQHANALAAAIPRAKGETLLQMKLVYNHLAPLFLLFLQWMDCSCAGFLHRYLDLFHILIYKVHNDGRSIMPTHGRKATIGDFYAVILPSLQRLHGSLEKLEVVKEEGQSSIEGPSYGKKVIEEGVKLTANVDLQREDECGICLEPCTKMVLPGCCHAMCIKCYRKWNRKSESCPFCRGSLRRVNSEDLWVLTCNDDVVDAETVSKEDLLRFYLYVSKLPKDHPDALFLMYYEYLI

SEQ ID NO: 33228 - protein, 117 aa, Glycine max
  unsure (1)..(117): unsure at all Xaa locations
  Clone ID: TF_LIB3242-254-Q1-J1-B6.pep
MALDQYFEEAMPQLDSFEDKSFLETWKCDSDDIADSDRNASGVFDCNICLECVQDPVVTLCGHLYCWPCIYKWLNFLSASCENEEKQQCPVCKSEISQSSLVPLXGRGQTELPSKGK

SEQ ID NO: 33229 - protein, 383 aa, Glycine max
  unsure (1)..(383): unsure at all Xaa locations
  Clone ID: TF_GmC631_1.pep
MHSQKVVEMEDKTESHMSSAAAFVEGGIQESCDDACSICLEEFGASDPSTVTTCKHEFHLQCILEWCQRSSQCPMCWQPISLKDPTSQELFEVVEQERSLRATPSRNAAIFHHPAFGDFELQHLRMSLNDADFEERIIQHLAAAAAMRRANQLGWREGQRARSSAHGHPQFLVFSNQPIAPSSVAGGENDPTAIPNRSPSTPITSVGNEASQQILHLQTQSSSSASGSPVMATNPRGIYSNERGSTACSSPANQDRAEPSELQSFSDSLRSRLNAVSMRYKESISKGTRGWKERLFSRSSSMSKLGSEXRRREINSGIASVSRLMESLETSENNRVVGTSLSNHTEGCSIGGVSNQNNVEARGENSSHDDNTPAACSANSHLN

SEQ ID NO: 33230 - protein, 178 aa, Glycine max
  unsure (1)..(178): unsure at all Xaa locations
  Clone ID: TF_GmC67144_2.pep
MSLPQTATSPPPHLYPQELQLKLYQAFIFSIPILFSIILFLLFYLFYLKRRASSLSSSSHLLPRTIANPPTTTPYHSSPCRLDLTLQFLDKLPRILFDEDLLTRDSLCCVCLGEFELKEEVLQIPYCKHVFHFECIHRWLQSNSTCPLCRCSIIXTTKFLNPAPPINIISSDPPQHGA

SEQ ID NO: 33231 - protein, 261 aa, Glycine max
  Clone ID: TF_GmC871_1.pep
MADPKAYSIVVLLHFFPPPPPPPQLPPRMAATATAEAKTYWCHECDMSVSLTLPPSPLLCPHCHTHFLELMDSPSLSQENDAESSLFDVVFQDALLLLNPNPNPNPKPLPSKPLPLPSLYVTPSLLSSLDPNGVVLCAVCKDQITLNAQAKQLPCQHLYHSDCITPWIELNSSCPLCRFRLEEEEEEGGDADADADAVMTEIRREIIARLTELTEEDFYGLRTTLSHIASRHALIEENQNHRAQIGEPRGGGGGGGGDSAC

SEQ ID NO: 33232 - protein, 301 aa, Glycine max
  Clone ID: TF_GmC292_1.pep
GSRIKVKCYATWCGWRFSGSVPSSDTTTEEFLNENQVDHPVWLIATVGLQESIINSITVCKYKKNEGLVEGTECSVCLNEFQEEETLRLLPKCNHAFHVPCIDTWLRSHTNCPLCRAGIVSNSVNSEAPAPVSNSEQENANLGRNQDTLLDNSRINEGGLSSNMVAGESSEAIDESNSKDRVNDETQNNGVLMNIEIQTEMGSVSTTECESHRVVDDHKHDDDTMLHTDNLGKQDQDGDYYYSKTCKTVRRSSIEECLHLSPVSMKRSFSSCNGRTLTSRGYMSLNSKLNSSLLEFSFYER

SEQ ID NO: 33233 - protein, 153 aa, Glycine max
  Clone ID: TF_LIB4164-019-Q1-K1-G8.pep
QVRFGLLVWQNLCAICLDPLSHKSKGSKAIFTAQCSHAFHFACISSNVRHGNVTCPICRAQWTQLPRNLNSGSTISTNRSDPILQILDDSIATFRVHRRTLLRSTRYDDDDPVEPDDAPEIHKLRFSLAPIPPKAPTSHLSPHPLSCGSSSLL

SEQ ID NO: 33234 - protein, 170 aa, Glycine max
  Clone ID: TF_GmC1275_1.pep
MGFPVGYPELLVPKMFLHALSLLAWLRSLVFALFRLLRISDLLDTDSAASDLPPPPPPREPTLSALLIREFLPVAAFRDLAAADGDPPPSGCAVCLSEFSSEEEIRCMANCKHIFHRWCVDRWVDHDQKTCPLCRTPFVPHHKLEEYNQRLWAASGVSQFYYQDDYTASL

SEQ ID NO: 33235 - protein, 212 aa, Glycine max
  Clone ID: TF_GmC1703_1.pep
MGGCCCCCSSKETVLSAPPAYYYYPRASEEHVPLSSHPGAASAFSGRLLVDTNLDTSSPDTYRPPPAPIPFNVTLGTTQTPPAAQEIRSDKNNTSLPSTNSNAIQEPVARDIHGTSAKLEEPKESECKVQTDLELDSAKGSEIELAKSGKPIDLVEEEDACPICLEEYDAENPKLATNCDHHFHLACILEWMERSETCPVCDQDLVFDPPIE

SEQ ID NO: 33236 - protein, 213 aa, Glycine max
  Clone ID: TF_GmC1703_3.pep
MGGCCCCCCSAKETVLSAPPAYYYYPRASEEHVPLSSHQGAASAFSGRLLVDTNLDTSSPDTYRPPPAPIPFNVTLGTTQTPPAAQEIRSDKNNTSLHSTNSNAIQEPVAGDNHGTSAKLEELKESDCKVQTDLELDSAKGSEIELAKSGKPIDVVEEEDTCPICLEEYDAENPKLATNCDHHFHLACILEWMERSETCPVCDQDLVFDPPIE

SEQ ID NO: 33237 - protein, 140 aa, Glycine max
  Clone ID: TF_GmC1254_1.pep
HRHVPHPSCDGLADIMIIRGRIMMGGRFNSHDQFRDWRLDVDNMSYEQLLELGERIGYVNTGLKEDEMGLNIRKVKPSSSNDTSKHQLDKKCSVCQEEYESDDELGRLKCDHSYHFQCIKHWLEHKNFCPVCKQEVVVRH

SEQ ID NO: 33238 - protein, 337 aa, Glycine max
  Clone ID: TF_GmC1038_2.pep
MSEAPPPPTADASPPPYWCYHCEKRVSVETLANLPDVVCGECKNGFVESMPTPSRSRSPSASSDDPYFGSQFLQVLRLIAQSARDDDASPPPPPSRSPENDFLRIELGGWDNDEENENDDDNGDEEFEEHEEAEDRSGNEDPHGGDDEDLRRRRRELLRLRIRDLATRTRSMRNRILDWAEILMGLEDNSIEFRLQLPESDRYVGNPEDYVDAAEYEALLQTLAESDGGGRRGAPPASKAALEALPTVKIASESEAVACAICKDLLGVGDAAKRLPCGHRYHGDCIVPWLSSRNSCPVCRFELPTDDKEYEEERVVIAASSNSNGASSSGGGGSAIV

SEQ ID NO: 33239 - protein, 510 aa, Glycine max
  Clone ID: TF_GmC1008_1.pep
MQSSHMGLGGREQCGVMEMDVNQVTQSAPDSPPFCDTKGSDNDCSDQDSEHPLPPGRLENSSLNRASTGNGNLKERMGQLRSESSASETEGLARDLKRQKNLDFKPGKDPGAPLPTNASIDLCPIGRICSFCQSSKISEVTGPMLHYANGNLVTGDAAMKPNVIPVHRICIDWAPQVYFVGEVVKNLKAEVARGAKLKCSKCNLKGAALGCYVKSCRRTYHVPCAMDISDCRWDHEDFLLLCPVHSNVKFPCEKIRSKKKATQKHPTFSHLPSHHSNRLEASQDASKKLVFCGSALSNEEKVFLINYASKVGATVTKFWTSNVTHVIAATDAHGACSRTLKVLMAILNGRWVLKMDWIKACMQEINPVEEEPYEINLDNQGCQGGPKAGRLRALANEPKLFSGLKFYFSGDYVSTYKEDLEELIEVGGGTVLRIKEELEAHRHECKGDSSKLLVVYNLDPPQGCKLGEEVSILWQRLNDAEDLAANTLQVIGHTWILESIAACKLQPFVY

SEQ ID NO: 33240 - protein, 155 aa, Glycine max
  Clone ID: TF_GmC25542_5.pep
RAARADSARDYFHCMKCNGCLGIKWASHKCLEKGLEMNCPICCDDLFTSSATVRALPCGHYMHSSCFQAYTCSHYTCPICSKSLGDMAGYFGMLDALLAAEELPEEYKDRCQDILCHDCNRKGTSRFHWLYHKCGFCGSYNTRVIKCETSNSSCS

SEQ ID NO: 33241 - protein, 481 aa, Glycine max
  Clone ID: TF_GmC1166_1.pep
MLIGTLPQGQTDMHPQVSTLKHPLIKQMYQALLMIIFCLHQVAGMFYAVPENYVHQPSNSNYDRQAFSAADGGIIDLTMVHGRGPQKRKIPGIPPVCERGSTSRYFNATNAADRPTSSELWPEKPNMDSLYMPWDHVNMTPTFRGRGLSIRGEGPLRNVRSRSALDLESNLARTHLSNTHPHNSYSTGLPIDHSNMVDLSTQTSGTLTRDWSPMSICPPHGRVSSSDANAFNHEASHFLIGSSSSNAPVDVGGFHNEFGTSRNPTAPQSFHNNLTQTARGVHSNYSQRSTPTFRASSSLRLGRVAPSDDGLHMVSESYSSRQPRPLTTVGWQNNNRNGRSRIPSDRYRSLDDEGFMIVDRTSLYGPRNMLDRHRDMRMDIDNMSYEELLALGERIGHVSTGLSEDLISKYLTETIYCSSEQSQEEEACAICLEEYKNMDDVGTLKACGHDYHVGCIRKWLSMKKVCPICKASALPEDKKGK

SEQ ID NO: 33242 - protein, 285 aa, Glycine max
  unsure (1)..(285): unsure at all Xaa locations
  Clone ID: TF_GmC1166_3.pep
GLPIDHSNMVDLSTQTSGTLTRDWSPMSICPPHGRVSSSXHFLIGSSSSNAPVDVGGFHNEFGTSRNPTAPQSFHNNLTQTARGVHSNYSQRSTPTFRASSSLRLGRVAPSDDGLHMVSESYSSRQPRPLTTVGWQNNNRNGRSRIPSDRYRSLDDEGFMIVDRTSLYGPRNMLDRHRDMRMDIDNMSYEELLALGERIGHVSTGLSEDLISKYLTETIYCSSEQSQEEEACAICLEEYKNMDDVGTLKACGHDYHVGCIRKWLSMKKVCPICKASALPEDKKGK

SEQ ID NO: 33243 - protein, 133 aa, Glycine max
  unsure (1)..(133): unsure at all Xaa locations
  Clone ID: TF_GmC705537_1.pep
PGXNELIEQITENDRQXXAPAPERAIEAIPTVKIESAHLKENSQCPVCQEEFEVGGEARELQCKHIYHSDCIVPWLRLHNSCPVCRHEVPVPSSSSSSEGDECVGDGARGYSPSNSPTLFSRANRRQPSCCIL

SEQ ID NO: 33244 - protein, 510 aa, Glycine max
  Clone ID: TF_GmC279_1.pep
MFFNQKIVLFKSFALMGTSNLLLFFSLMSLCAMAASKVVLIGNNITLSFDDIEANFAPAVKGSGKYGVLYLAEPLDACAELTNKVEQLPNASSPFALVVRGGCSFEEKVGLAQKAGFKAVIVYDNEEGGILVAMAGNSAGIRIHAVFVSKASGEILKKYAGLTNVEIWLIPTFENSAWSIMAISFISLLAMSAVLATCFFVRKHRIRRERPRASLVREFHGMSSRLVKAMPSLVFTSVLEDNCTSRTCAICLEDYCVGEKLRILPCCHKFHAACVDSWLTSWRTFCPVCKRDARTGLTDPPPSESTPLLSSTPASMASSVLSSARSSLASSSAIQIARTASMASSALPSARSSLASSSAIQIARTASMASSALHSARSSLASSSAIQISRAASQTPSVSRNHSIASTPYVQPSLRSSYHQSPSLSISRSSVDLRNASQRSLASHLNSPCSMGYPSLSSLNSRYMSPHIPSPSNASVSYMGSSSHQQHPLRYSESAASFSPFASTHSLPEC

SEQ ID NO: 33245 - protein, 230 aa, Glycine max
  Clone ID: TF_GmC6770_1.pep
MSKDKDGEEPLGIGLQVMLAAAFSLFGMILLIIIFHFCVKYFIRRQQRRRQNDLLYQISTQIAPIDVSSVEPRNSGLDPLIIASLPKLLYKQTDQFKQGEEVVECSVCLGTIVEDTISRVLPNCKHIFHVDCVDKWFNSNTTCPICRTVVDPKVQPEHGHLGATRLHNQVQPTAPPAEGGDELPDGNELERVGCSGLRIGSFHRMVSNRERSGRRTQSCDGSTIVDIERP

SEQ ID NO: 33246 - protein, 248 aa, Glycine max
  Clone ID: TF_GmC37985_1.pep
MSWNSRMEAHYNTISYPYNTAGSFIEYFEGLTYEHVNFIFSGASHAQESSYPSNSSFYKFGHCEPENNSYYRYSHGYEVNHHEPLVDEYRRPSENSLTINEQSPAVSTEWVEGGNTDTQDNSIECPRRHHSNSNDYQVIWQDNIDPDNMTYEELLELGEAVGTQSRGLTQEQISSLPVSKYKCGFFLRKKSRDERCVICQMEYRRGDKRITLPCKHVYHASCGNKWLSINKACPICYTEVFADKSKHK

SEQ ID NO: 33247 - protein, 246 aa, Glycine max
  Clone ID: TF_GmC635_1.pep
MTSASELFHSRRHRLGRNALDLGLDTELHAADSLRQLRLRHYYLRRHHPERASDRIDGRYRRSFVSESVDSEENVRSSLRGSSSERLPVGVVLARARLLQRLRGEPLSTNRQYDRDSFGEDPESESSNEDPSGASLVTELTSQMARSQFLQELSTKPPGLTQEALDCLHQEVFSSNASEIGLDSRVLQDCSICLESFTDGDELIRLPCGHKFHSVCLDPWIRCCGDCPYCRRCIVVNTHSSLNEDE

SEQ ID NO: 33248 - protein, 236 aa, Glycine max
  Clone ID: TF_GmC635_3.pep
MTSASELFHSRRHRLGRSALDLGLDTELNAADSLRRHYHLRRLRHHPERASDRIDGRYRRSFASESVDSEENVRSSLRGSDSERLPVGVVLARARLLQRLRGEPLSTNRQYDRDSFGEDRESELSNEDPTRASLVSDLTSQMARSQFLQELNTKPPGLTQEALDCLHQEVFSSSGNEIGLESRVLQDCSICLESFTDGDELIRLPCGHKFHSVCLDPWIRCCGDCPYCRRSIVVIN

SEQ ID NO: 33249 - protein, 246 aa, Glycine max
  Clone ID: TF_GmC340342_1.pep
MESKYFDSNGEVSLKQKSKSISAEPTISTSEYDCFDCNICMESAHDPVVTLCGHLYCWPCIYKWLDVQSSSVEPYQQQTCPVCKSEISHTSVVPLYGCGTSNSESNAKKLQMSLGIPHRQPPCSLNAMLTSPRSRISHPSQQLHPSYFQTQSRPFHYQQFYGSYGTNGLPYLGGASMTSFFNTVIDMFGEMVLTRIFGISDANLFANPLNGSGSSRMRRQEMQIDKSLNRLSIFLLCCIMLCLLLF

SEQ ID NO: 33250 - protein, 184 aa, Glycine max
  Clone ID: TF_GmC6834_2.pep
MAFQHYISRDLKTIPNAVTEAENPNGCFDCNICLDFAHEPVVTLCGHLYCWPCIYKWLHVQSDSLPPDEHPQCPVCKADISNSTMVPLYGRGHAATTAEGKTASCDVFIPPRPSASCAQALLATSQRGQHLPYRNPYQGHYFTSHPYQEEDDATSQMLQSWIPSPPCDWGCLGEMVYAQGCLAT

SEQ ID NO: 33251 - protein, 61 aa, Glycine max
  Clone ID: TF_GmC37342_3.pep
CFICRNTFVDPVVTKCKHYFCEHCALKHHAKNKKCFVCNQPTLGIFNVAHEIRRKMAEDKS

SEQ ID NO: 33252 - protein, 239 aa, Glycine max
  Clone ID: TF_GmC5679_1.pep
MDYLDHDHDHDPFHDHDDFNRRILIMAIVSLSVVLVLVFALHLYARVFLRRQTRRRAAIYQLSLNVAQAHAEPHNNTGLNPALITTLPSFPFKQNQHHDSAECAVCLSVLEDGEHVRLLPNCKHSFHVSCIDTWLSSHSTCPVCRTKAGPVQLEPVRLEPQPREGPTGLVLADVVAPTAPLLFENVEGTSDGANNNGSPKVSGSNSRLSSFRRILSRERSMRRILPSSHDDVEHDLERQ

SEQ ID NO: 33253 - protein, 226 aa, Glycine max
  Clone ID: TF_GmC7726_1.pep
MTRAFRILGSADNATSLAAVAAPPEAVALESDFVVILAALLCALICVVGLVAVARCAWFRQGSGGGSSPRQALANKGLKKKVLQSLPKFAYVDSNPSKWVATSECAICLADFAAGDEIRVLPQCGHGFHVPCIDTWLGSHSSCPSCRQILAVTRCQKCGRFPAPGAGASRTPATEPELKSREDNNVASYSNNNINNNSDRGGNNSNSNCNMEHHHHSHHVNSGFLP

SEQ ID NO: 33254 - protein, 324 aa, Glycine max
  Clone ID: TF_GmC166463_1.pep
MKFCKKYQEYMQGQEKKLPCVGFKKLKKILKKCRRNSSSQKPLHASLAAKTCPDHCPVCDGTFFPSLLNEMSDIVGCFNQRAQKLLELHLASGVRKYFLWIRGKLQGNHTALIQEGKDLVTYALINAIAIRKILKKYDKIHYSKQGQLFKSQIQSMHKEILQSPWLCELMAFHINLRETKVKSRKAHALFDGCSLTFKDGKPALTCELFDSIKVDIDLTCSICLDTVFDPVSLTCGHIFCYICACSAASVSIVNGLKSADPKMKCPLCREGAVYEGAVHLEELNILLSRSCQEYWEQRIQTERVERVKQIKEHWDSQCRAFVGV

SEQ ID NO: 33255 - protein, 170 aa, Glycine max
  Clone ID: TF_GmC1667_2.pep
MGFYAEDTLSGLTIGQAIYEVALMIAVLRWVLCLIFRVMNDRRRTESDETPAAEACCQKEYNNTLVLTTFGEIKERLPQTEETCAVCLSQLSVEDEVRELMNCYHVFHRECIERWLEHEHENHIPTCPLCRAPLLSSCCHHSSTTCVPPPQPSWAVERLLYLFGDDLLPC

SEQ ID NO: 33256 - protein, 117 aa, Glycine max
  Clone ID: TF_GmC999_1.pep
MASMKVTWVVVIMCMAVVGAPMMAQAMTCNDVTVNMAQCLSYLMQGGTPSTLCCSGVKNILGSAVTTVDKQTVCNCLKADAARYNINDQYAQALPGFCKVNVPYKISRSTNCASIRF

SEQ ID NO: 33257 - protein, 146 aa, Glycine max
  Clone ID: TF_GmC999_10.pep
RPLPYDADLRFFRSQREGLVSRREKGSSHLNEESEPLRGDVDADSESLNSGGKWNDTSEDGSKEYRSKSSVRLSSAKLTTGAGVVYSSSEEEDVCPTCLEEYTEENPKIVTKCSHHFHLGCIYEWMERSDSCPVCGKVMVFDETTD

SEQ ID NO: 33258 - protein, 184 aa, Glycine max
  Clone ID: TF_GmC56608_1.pep
MTRALRYLGERNSATDSAVVDSDFVVIFAALLCALICILGLVAVTRCGCLRRLRLSSSNATPQPPPASANKGVKKKVLRSLPKVTASAESAVKFADCAICLTEFAAGDEIRVLPQCGHGFHVSCIDAWLRSHSSCPSCRQILVVSRCDKCGGIPAPASSSSAPPLADSGDRLKGREEDANRFLP

SEQ ID NO: 33259 - protein, 551 aa, Glycine max
  unsure (1)..(551): unsure at all Xaa locations
  Clone ID: TF_GmC5631_3.pep
MGEGRRGGTSKLREAARRVAVAAAYACGSFSRRKALVDPVSIDNSCSLSATASNSSFLSPSTTKNSSEELTEETYSGITTNINNELHSKNLCAICLDPLSYHSKGSSPGQAIFTAQCSHTFHFACISSNVRHGSVTCPICRAHWTQLPRNLNNNLGPFTSSNQSDPILRILDDSIATFRVHRXSLLRSARYDDDDPVEPDETPESPKLCFSLVPIPPNAPTSYNPALQVTKHAXMSLPSIPSSSNLQLLVIATISTNAKTLCHVSLFQYELISLXKLSHERATDLVLVASPNGPHLRLLKQAMALVVFSLRHIDRLAIVTYSSAAARVFPLRRMTSYGKRTALQVIDRLFYMGQADPVEGLKKGIKILEDRVHKNPESCILHLSDNPTRPYHAVSMELPSTPIHRFHVGFGFGTSSGFVIQEFEEFLAKMLGGIVREIQLRICGAGEEVGSGRVIRIGEIRGGEERRILLDLGDCTHVYVEYSYIEGEIDECVRRTGETVVGVGEHKGDVSENGENTGGGGGGRSSSVESWDFHDPYMARRWAKHLHGYRL

SEQ ID NO: 33260 - protein, 205 aa, Glycine max
  Clone ID: TF_GmC747027_1.pep
MEREEGKQPPQKTPLHNQHEQANSDNNFVQQNNLQEQSGTFTTFASFESETEGESSFDDNDYDADFFLSQEFESELQFLESERSNDNGDDYDNEDDEHMEEDEIDVDELTYEELIELGDFIGQEKRGLSAHEICSCLHSHTFHSAENKSGIDRCVICQVEYEEGESLVAIQCEHPYHTDCISKWLQIKKVCPICNIEISAPKMVS

SEQ ID NO: 33261 - protein, 189 aa, Glycine max
  Clone ID: TF_GmC18_1.pep
IRLLLLHYVTIYLILHGCIFWGSITGRLPGVGLLARKRTEQNHRYEHQHHATCRQSYHLGESSLEPPWIPLTVLDETALKARQRLHKKLGHFFSSYRSSENPRKEGKVNQSSYEKKDGGIGRKLLESSWLLRGNKFKKDRKVCAVCLEDLGQEQQVMNLSCSHKYHSACLLPWLAAHPHCPYCRTPVQP

SEQ ID NO: 33262 - protein, 361 aa, Glycine max
  Clone ID: TF_GmC12124_1.pep
MNLETQPGTASYWCYSCTRFVHLSVQSTIACPHCQSGFVEEIRAGAGAEASPRHRLSPFPDDPLLLRRQGFRRRRREASGNRSPFNPVIVLRGPGDDSAAADHDGVSTFELFYDDGDGTGLRPLPPTMSELLLGSGFDRLLEQFAQIEMNGFGRPENPPASKAAIESMPTVEIGETHVETEAHCAVCKEAFELHAEARELPCKHIYHSDCILPWLSMRNSCPVCRHELPSDLETRVPSQIDEETIGLTIWRLPGGGFAVGRFSGGRRTGESHFPVVYTEMDGGLNTNGGAPRRISRSVRSNRVRESRGFGRVISNFFSFFGRIGSRNSSSGHGSVSRSRSHVSSIFNRSSRRHSRTWVMDD

SEQ ID NO: 33263 - protein, 120 aa, Glycine max
  unsure (1)..(120): unsure at all Xaa locations
  Clone ID: TF_GmC739933_1.pep
MERYLWNGYVQLLHKPINVIAHATSYGEESDIYNDDIVRGITVKGMAWNIIQKLPVQQFNSSKMFKLYNDSCCSICFQDFEYEEFVRTLPKCGHFFHXCIDKWLVQQGSCPMCRIFVSDL

SEQ ID NO: 33264 - protein, 159 aa, Glycine max
  unsure (1)..(159): unsure at all Xaa locations
  Clone ID: TF_GmC54233_1.pep
PIYAFYLELIIXMLHFPMYMCFFLMIFVNYGIPFLLIRQLSRTFCDFKVRVADYIRYRKITSNMNDRFPDATPEELNASDATCIICREEMTTAKKLICGHLFHVHCLRSWLERQHTCPTCRALVVPPENGTTAAAGQQGSQCVHNGEQLGQAVEAQLLD

SEQ ID NO: 33265 - protein, 170 aa, Glycine max
  Clone ID: TF_GmC54233_2.pep
KITSNMNDRFPDATPEELNASDATCIICREEMTTAKKLICGHLFHVHCLRSWLERQHTCPTCKTLVVPPENGTTAAAGQQGSQSDVHQRGTTGTGSGSTAQTEATDSLSRHQARLQAAAAAASIYEKSYVYPSMNSLVWYDIFPKMLSFTIFSLLTPKGTSCSCNPLISH

SEQ ID NO: 33266 - protein, 237 aa, Glycine max
  Clone ID: TF_GmC98_1.pep
MAFEEHYVSQELKTIPSSMTVTENLDGCFDCNICLDFAHEPVVTLCGHLYCWPCIYKWLHVQSASLAPDEHPQCPVCKDDICHTTMVPLYGRGQGIAHSDHDGKASSYRGSCIPPRPPALGAQSLIATSSQSVPYRNTYQNQHLYQEEDASSSQMLNPGATILAPGFPHLVFGMFGEMFYTRVFGNSENLYTHPNSYHLGESNNSPRLRRQEMQANKSLNRISIFLFCCFLLCLIVF

SEQ ID NO: 33267 - protein, 143 aa, Glycine max
  Clone ID: TF_GmC1701_2.pep
MEDDDAAIEVRNHVSPEPEVEDSSCCCPICLGSFLQLSYLDKCFHKFCFNCILRWTKVVASKHRSPPSSVKCPLCKTENFSIIYVVDGSCFQRHYVNQDFENSFILSRAHRYRVQCYYTEQGFVDDIFHISQYWRSQKYYQPN

SEQ ID NO: 33268 - protein, 68 aa, Glycine max
  Clone ID: TF_jC-gmst024166b09b1.pep
ICISSYEYGGDIHVLPCHHHFHYTCIVKWLKMNAPCPLCKSSILKANDTGVKSIRRSQIYNIELSFNI

SEQ ID NO: 33269 - protein, 444 aa, Glycine max
  Clone ID: TF_GmC7715_1.pep
MLYPLRARETSLSHSLSLSITLSHPLGFPFHRILSLQPRLVISMEGAGMEENNIINDDDNNNKSEAHLTSAAAFVEGGIQDACDDACSICLEAFCDSDPSTVTSCKHEFHLQCILEWCQRSSQCPMCWQPISLKDPTSQELLEAVERERNFRFNPSRNATIFHHPTLGDFELQHLPVGASDADLEERIIQHLAAAAAMGRARHIARREGQRNRSSAQGRPHFLVFSTNPNSPPMAPASSSPSQRGDDEPIPTIAVANLSPTPATGEESSQLTLVPPIQAEQVSASGSGSTALATDHQGSSYNNRRSPNQSSPSSQDRAGPSELQSFSESLKSKLNAVSTRYKESISKSTRGWKERWFSRNNTMSDLGSEVRREVNAGIATVSRMMERLETSDNNRSNSNSAPSNIEDGSVQEYNGQTLTPGNEGDGLLRDNNTKASCAAGSSSN

SEQ ID NO: 33270 - protein, 161 aa, Glycine max
  Clone ID: TF_LIB5118-039-A1-PF1-E1.pep
CLPWLSNISGYSYGIGISIGILLLIITITLTSYFCTRSQVSFAPATRNRRRTPNVLEPQHSIVDVSLDEATILSYPTLLYSEAKLKKSDSTATCCSICLADYKGTDMLRMLPDCGHQFHLKCIDPWLRLHPTCPVCRTSPIPTPLSTPLAEVVPLASRQDS

SEQ ID NO: 33271 - protein, 654 aa, Glycine max
  Clone ID: TF_GmC273_1.pep
MVSGWRRTFRTSNTIPQNTQEPENCNYCYDNNNINSSPKITSTNFSSSIPTLHSRTNSPLSKHNNNNARTPSPTKRNTPVSFHQSTPSSPNSPSTFSLLKSTLRLSKGSCEICMRSVKTGEGKAIFTAECSHVFHFPCLAGHVKKHRMVTCPVCNANWKQLQQNADENKGNAELKTTRSFKLHNYDDDEPLMSPTSVSRFNPIPESSENEEEEDEEQNDEETNFNVSSMIRTKNIDAFFSPEAAVVASNRSSETYVAVLNVKSQPRNAAANRPPADLVAVIDVGGSVSGEEYRMLKRSMQVVISSLGSADRLSVVAFSGGSKRLFPLRRMTGRGQMAARRVVDALSTVELRRDGTAARNNALKKAARVLEDRRQKNTVAKIILLTNSHEDQRLSSTRFDIHSLRYSYDGACNHAQHDHELAKRVGNLLSVAAQDFKLELKLTSRSAPAEISAVYSLAKGCTDALSPESVALGDLYAAEGREILVELKVPAGTASRGSHQRVISVRCSHRDPFTRELVISKERELIVPGPRTVRSCDPRIEQLRRCQVSARAVAESRRLMARNDVSGALELLSSARASVSREQGDECLRWLESEQAELRSQKLRSSCNNNCFDEKGEPLTPMSAWRVAERLAKVAIMRKSMNRVSDLHGFEDARF

SEQ ID NO: 33272 - protein, 81 aa, Glycine max
  unsure (1)..(81): unsure at all Xaa locations
  Clone ID: TF_7042560.pep
MVGDGRTCRKASXLVAKALGVETSQGEGFAANLFHCNVCLDTARDPGLTCCGHLFCWPCFHKLSYADSDVRKCPVCKGDVP

SEQ ID NO: 33273 - protein, 549 aa, Glycine max
  unsure (1)..(549): unsure at all Xaa locations
  Clone ID: TF_GmC278_1.pep
MGHRQLHNTSSLFDGEPDQNWNHLHTDQQCVHLGRTNTSENSSFIYPAENMSIDSISFPSHWNSSTRSNGYASSSHNIVVPPHXSDASGTYNDXFMYLSRTVSLFRASENYLHQPSSSNYDRQTFHVDAGFIDLTMGSGQGHHKRKSPGIPSVYEGGSTSRYFNAGSSTDLPISSELWQEKPNIDSQYMPWDHFTMTPTFRGTGLSIKGEGSLRNVRSRSTLDLDSNLSRTHLSSNHSHNSYPTVPPVDHSSMADLSGQTSGTLTRDWSQMNMSPANGRVLLSDTSSFGLETSHFLVGSGATASNASVDVGGFHHEFGASRNPTAPQSFHNTHTQTARGIRSNYSQRSTPTFRASSSLRLGHVTSDDGLPMVAESYSSRHPRPLSTIGWRNGDRNGRSRISSERYRSLTEESGLHDRFSSEGFMVVERASVYGSRNMLDQHRDMRMDVDNMSYEELLALGERIGYVNTGVSEDLLSKCLTETIYCSSEQSEDEGNCVICLEEYKNMDDVGTLQTCGHDYHVSCIKKWLSMKKLCPICKVSALPEDTKDK

SEQ ID NO: 33274 - protein, 551 aa, Glycine max
  Clone ID: TF_GmC278_2.pep
MGHRHLHNTSSLFDGEPDQNWNHLHTDQQYVHLGRTNTSENSSFIYPAENMSIDSISFPSHWNSSSRSNGYASSSHNIDVPPHQSDASGTSNDHFVHSSSAGPSLFIPLENYAHQPSSSNYDRQTFHVDGGFIDLTMGSGQGHHKRKSPGIPSVYEGGSTSRYFNAGSSTDLPISSELWQEKPNIDCQYIPWDHYCTMTPTLRGTGLSIKGEGSLPNVRSRSTLDLDSNLARTHSSSNHSHNSYPTVPPVDHSSTADLSGQTYVTLTRDWSQTNISPAYGRVLFHASGAFGLETSHFLVGSGATASNAASVDVGGFHHEFGTSRNPTAPQSFHNTQTQTARGIRSNYSQRSTPTFRASSSLRLGQVTSDDGLPMVAESYSSRLPRPLSTIGRRNGDRNGRSRISSERYRSLAESGLHDRFSSEGFMVVERASVYGSRNMLDQHRDMRMDVDNMSYEELLALGERIGYVNTGISEDSLNKCLTETIYCSSEQSQDEGNCVICLEEYKNMDDVGTLKTCGHDYHVSCIKKWLSLRKLCPICKVSALPEDTKDK

SEQ ID NO: 33275 - protein, 441 aa, Glycine max
  unsure (1)..(441): unsure at all Xaa locations
  Clone ID: TF_GmC665_1.pep
MEEETSDAMNLDLNLGPGPEPETGPMSNEAVNLDDWIGEPLQRISEAVRRARQRWRWRHLPLPHPEFHAHFPTEATRHFQIPPEARNISVELNHFLVNSGNGSALQAGEGSVAAEERMEEVPKACDNVNGVAEDXTSQKKEDVEKGSGNDGDFFDCNICLDLARDPVVTCCGHLFCWSCLYRWLHLHSDAKECPVCKGEVTLKSVTPIYGRANNVRGPEEDSALKIPPRPQAKRVESLRQTIQRNAFALPVEEMIRRLGSRIELTRDLVQPPEPDAARETAERTTSLLRFLTAQGIRREHQNLVAPPEDVMGLAQNNVNTSEAGDPRTRVQSHLLRRTQSHRATLSTLSSALTSAERLVEAYFRSNPLGRNQEQPPPPVDDRDSFSSIGAVINSESQLDTAVEIDSMVSLSTSSSRRRNDASRVSDVDSGDSRAPRRRRLN

SEQ ID NO: 33276 - protein, 293 aa, Glycine max
  Clone ID: TF_GmC187_1.pep
MFTFISFLHVAAILLLQEYRNTQSGAAKVSILMIGQQAIVDAYLCLTHLTAGILVESLFNAFATAAFFKFVVFSIFEMRYLLAIWKASRPLSNGEGWETMRRELSVLYSRFYGILLGGILLMYEFHNHLRPILLLVYSFWIPQIITNVIRDSRKPLHPHYILGITVTRLAIPLYIFGCPNNFLHIEPDQSWCVCLAIFVGLQAAILLLQHYFGSLWFIPRQFLPEKYCYYRRFAQDTNHATDCVICMTAIDLSPRSNDCMVTPCDHFFHSGCLQRWMDIKMECPTCRGPLPPA

SEQ ID NO: 33277 - protein, 196 aa, Glycine max
  Clone ID: TF_GmC1777_1.pep
MSQLGAVLRTQREPRRSTILGLLTEQMDGVDSGTRRRRSFKERFGFIGMGCCGATWGFRSDALSVTQGEQQQQETDPECVGPAGLGSGMNLAAALAAERQLRGPQEEAVRAPGTPWRVSLMRLLEETEAEKEKEKEKEENVVGNDSVCCVCMGRKKGAAFIPCGHTFCRVCSRELWLNRGSCPLCNRSILEILDIF

SEQ ID NO: 33278 - protein, 75 aa, Glycine max
  Clone ID: TF_GmC101798_1.pep
MPWPSICCPITKKLVICYICLVEYEDGDNMRVLPCHHEFHRTCIDKWLKEIHRVCPLCRGDICIFDSTPTENSSD

SEQ ID NO: 33279 - protein, 201 aa, Glycine max
  Clone ID: TF_GmC263823_1.pep
MTRGLRLLQSAAAPPPEAAAAVESDFVVILAALLCALICVVGLVAIARCAWLRRGPVAGSGSGAGESPATANKGLKKKVVNSLPKFTYAGGGDRCKWSECAICLTEFGAGDEIRVLPQCGHGFHVACVDTWLASHSSCPSCRAPFAVTARCHKCGHFPAVSAAAASESKAVGGDNAADSTANANRNNVIITNGFSNYGFLP

SEQ ID NO: 33280 - protein, 161 aa, Glycine max
  Clone ID: TF_uC-gmroLIB3259P159g12a1.pep
AIARCAWLRRGPVAGSGSGAGESPATANKGLKKKVVNSLPKFTYAGGGDRCKWSECAICLTEFGAGDEIRVLPQCGHGFHVACVDTWLASHSSCPSCRAPFAVTARCHKCGHFPAVSAAARRRRQWRMRMVIMLLLRMDLVITVSCLESCFSNYEFACKYR

SEQ ID NO: 33281 - protein, 371 aa, Glycine max
  Clone ID: TF_GmC57441_1.pep
MGISWSGRRRNNYLQNRPPPPPPSYYYHTESHPAPPPQPQGYFLPSATPYAPPPPMPPPPPPQTHSISFYYSSNPNSYGTPTLAPRFHYPQHYYHPQPQPQLAAWPVPRPAAPTPPPYVDHQTAKKIRNYVNVHKDTLRLEVDDHNPDLHLLSFVFDAVYDGSITILYFAKEEEKCRFVPLYPEAFQPVRIPFQKGVGQKFAQPSGTGIDLGFFELDDLSKPSPGEDVFPLVICAETSLKTTSEDETPGDSLLDASPHMQITQGVLEKSNGAGPFLIKVVKQILWIDDVRYELRELYGIGNSSAADFDDNDPGKECVICMTEPKDTAVLPCRHMCMCSECANAHRLQSNKCPICRQSIEELIEIKVNNGDH

SEQ ID NO: 33282 - protein, 183 aa, Glycine max
  Clone ID: TF_20075430.pep
LECAVCLNEFRDDETLRLIPKCCHVFHSDCIDAWLANHSTCPVCRANLAPKPEDAPSSVEIQLSDPARPIGPNEPGHDPNYINPVEEREGEQNRIVTEPPRVLDDPNRARPVRSKSTGFGIARLFPRSHSTGHSLVRPGEDCERFTLRLPEEVRDRLVRSATLNRTKSCGMTWQLESSERRGY

SEQ ID NO: 33283 - protein, 240 aa, Glycine max
  Clone ID: TF_GmC759_1.pep
MALDHFEETVHQKGNWKSSSEIIADSDRNASGDFDCNICLECVQDPVVTLCGHLYCWPCIYKWLHFQSTSLDDEEQQRPQCPVCKSEVSQSSLVPLYGRGQTTLPSKGKPRQVGTVIPQRPHGPRTLNTRSVSQPISQSYHPYSNPYHPQQHFNSIPSGYTSPMIRTTGSIDNTFGIFGEMIYARVFGNHVSNIHTYANSYNLSGTSNPRMRRHLMQVDKSLSRISCFLLCCLVLCLLLF

SEQ ID NO: 33284 - protein, 126 aa, Glycine max
  Clone ID: TF_LIB3138-015-Q1-N2-E3.pep
PTRDDYINQNLTPSPASDERACPICYENWNADTEQIIRTHCNHTFHRECFIAWLGKENVNSANSCPSCRAICYPKVEHQKETRLTLDMSFLYRTMRSEYITRISLARQSRAKKHTNQRRYDDEDGF

SEQ ID NO: 33285 - protein, 374 aa, Glycine max
  unsure (1)..(374): unsure at all Xaa locations
  Clone ID: TF_GmC857_1.pep
MMMSSGTSSYWCYXCSRFVRVWPHHTVVCPDCDGGFIEEIEHPPRSVHLDPRRHRHRFPAAAMYMIGQRPSSDPRPASSLRRTRRNGGDRSPFNPVIVLRGGAEDESRGFELFYDDGTGSGLRPLPPSMSEFLLGSGFDRPLEQLSQIEINGIGRYEHPPASKAAIDSLPTIEIDDTHLAMESHCAVCKEAFETSTAVREMPCKHIYHPECILPWLALHNSCPVCRHELPADTPNPNQNQNPSQNVALNEEENVGLTIWRLPGGGFAVGRFSGGRRGAERELPVVYTEMDGGFNNGGGEPRRISWSRGNRGRESGGLTRFFRNLFGCFRGSSTQRSASSRESMRASSSRSSTMDPSLRSRRTWSMDVNSGMRAW

SEQ ID NO: 33286 - protein, 100 aa, Glycine max
  Clone ID: TF_GmC4135_1.pep
LPIFKFKLKNNENGDDQDANSAIDEGGILAAGTEKERMISGEDAVCCICLAKYADDDELRELPCSHVFHVECVDKWLKINATCPLCKNEVGTSNGGSPSA

SEQ ID NO: 33287 - protein, 222 aa, Glycine max
  Clone ID: TF_GmC6815_1.pep
MCNTLKFNPFKNRLLIMFMLVLSLPFNVQSQAKDSEEQNLAELPQTVHPSKGIVIAVLSTMFAITLLLLLYVKFCRTIPHELLRQNSNLQNFQGLTRSRSRVSGIDKQVVETLPFFKFSSLKGSKEGLECTVCLSKFEDTETLRLLPKCKHAFHMNCIDKWFESHSTCPLCRRRVEAGDIKNLNFSLSSRFLRVPSNLTEDPNLEIFVHREPSHGGSASIQR

SEQ ID NO: 33288 - protein, 357 aa, Glycine max
  Clone ID: TF_GmC1738_2.pep
MSSQTAPTEAPEPYTPLLRSRTDAGRGPAPTLALLLGRAGRRGPSMLVRETAARELEERRADWGYSKPVVALDMSWNMAFVVVSAAMLACTTSEHPTTPIRVWIVGYALQCLVHVLLVWLEYRRRSRRDSRSGSQRARDVESDAGSGDDDDYSDDGDGSSGNTSRSRFAKRCESLNTGVSFLWWIVGFYWVVSGGDILLQDAPRLYWLAVVFLAFDVFFAIFCVVLACLIGIALCCCLPCIIAILYAVAGQEGASEADLSMLPKYKFRILSDVDKPSGGAGSMVPIETSSAYLENERTLLLEDAECCICLCSYEDGAELHALPCNHHFHSSCIVKWLKMNATCPLCKYNILKGNEQV

SEQ ID NO: 33289 - protein, 229 aa, Glycine max
  Clone ID: TF_GmC288365_1.pep
MSMQKESPLIRLHSFDQGHAWLALLHLLIHISPAVTGQPVTPPVQPDSNKSVIAIMAIVVIMFLISAFLSLYSRKCSDRPVQTRGILDLAGPTGAAGNPLQAESNGLNQATIETFPTFLYADVKGLKIGKDTLACAVCLNEFEDNDTLRMIPKCCHVYHPDCIGAWLASHSTCPVCRANLVPQPEDMNTNTNTNMPSILSIQIPNEEEREHEHEHEYEAVIVGEHIRGC

SEQ ID NO: 33290 - protein, 972 aa, Glycine max
  Clone ID: TF_GmC689_1.pep
AIELKCPICWSLLDSAVSLTCNHLFCNSCIFKSMKSASACPVCKIPFTRREVRPAPHMDNLVSIYINMEASSGVNTFVTQNAPVTNLSDGEKECEGDADSGKMKAGGTHEGRPQEKKTRKKKKSKKTVQASMESSGSEFAKPSFPAKKRVHVPQNLLSETPMKNLKIGDSLSEINKEKEGTEKVPVKESERPLQSEKDNPVLSPFFWLREEKDGEMLSQQTDEDQIIDGSTPNPPSFSDLKDSDDEVHSNVDLMDEVQNKSSVNLFDSEMFEWTQRPCSPELFSSPSKMQVMDTYEDDENQEELVASSLELEANLPRVDADNMEFENPKEGNRMADEVPPSVCFPQIRSSDDLNGIKKSTKRRKARDKNKQEQIGEPKNSFDEMYVEVTQEQALDNSSNLGKGSRRGKRVCFNTSPIPTPITACTVPNTLGVQSIGEMKKAKNIDILPCKQENEKHYAQEISGKSQMKISGKQNINQMNEFAGSDSSIFSLRTDNNGKDSNRRQCKSKYSRKTIYCSKELETTKRQKLSSACISKTKNNEEILPIESIHQGPDVRDLNDTSKEKHCPLMDQTVLRKCENLVKNYQCVFCLSSEESEASGPMVHYLDGRPVTSDYEGGSKVTHCHRNCTEWAPNVYFDGDYSINLDAEISRSRRIKCSFCGLKGAALGCYEKSCRRSFHVPCAKWTSQCRWDTQNFVMLCPLHASSMLPCEGSGSQKRSKKCTASEGKAHGPKHDTTSQSRAAYLSYKKIVLCCSALSVQEREVVSEFERVSKATVLKNWDSSVTHVIASTDENGACRRTLKVLLGILEGKWILNIEWIKACMKEMGPIDEECYEINVDIHGIRDGPRLGRLRVLNKQPKLFYGYKFYFMGDFIPSYKGYLQNLVVAAGGIILHRKPVSGDQESTSPDMHTYQTLIIYSLELPDKCKPSKKDTICSQRRHDAEVLASSTGSNVASNTWVLNSIAACKLQYLAQ

SEQ ID NO: 33291 - protein, 354 aa, Glycine max
  Clone ID: TF_GmC1038_1.pep
MPSKHKQTLQRFVSFHLRRTMSEAPPSQPSPPTANASPPPYWCYHCEKRVSIETLANLPDVVCGECKNGFVESIHTPSRSRSPSASSDDPYFGSQFLQVLRLIAQSARDDDASPPPPPSRSPENDFLRIELGGWDNDEENDNDNDNDDEEFEEHEEAEDRSGNEDPHGGDDEDLRRRRRELLRLRIRDLATRTRSMRNRILDWAEILMGLEDNSIEFRLQLPESDRYVGNPEDYVDAAEYEALLHTLAESDGGGRRGAPPASKAAVEALPTVKIASESEAVACAICKDLLGVGDLAKRLPCGHGYHGDCIVPWLSSRNSCPVCRYELPTDDKEYEEERVVNSASSSGGGGSAIV

SEQ ID NO: 33292 - protein, 248 aa, Glycine max
  unsure (1)..(248): unsure at all Xaa locations
  Clone ID: TF_GmC787101_1.pep
KNSGIDRSVVESLPVFRFGALRGQKEGLDCAVCLNKFEAAEVLRLLPKCKHAFHVECVDTWLDAHSTCPLCRYRVDPEDILLVEDAKPFRQSHQQQRNKEEERVRLNLDLEKQEIVESRRRHSSAWGGGRRXTEEQQQSRRWTTSFRRSPGGRSATSRKKNESVGVGCFVRPRKDGMLLTQETERASVERRLEHRIIVSPGQGPGPGPGPGPCGLEQRWSDLQASDLLYLTSEMIMMRDSWNGRGSGV

SEQ ID NO: 33293 - protein, 355 aa, Glycine max
  Clone ID: TF_GmC255_1.pep
MYAFSLNMVLHHRKLLLFPPPPPPLCRSACPEKFNDPLPPPNSPDDYLTQSPTKNIKISKYLIISFSIVATAFIVLSFYAIYAKFFSPRNRSIRRTLSRPETEQDFLDEEEQQQHGPVVDHPIWYIRTTGLQQAVITAITVCNYKKDEGLIEGTECSVCLSEFQEDESLRLLPKCNHAFHLPCIDTWLRSHTNCPMCRAPIVTDPTRVPSSMDPTAFETSSFVEEIFENSAENTQNSSDDLLRGEEEERVQEDEACEENLASELVVTVQQPRRSVSLDSSSAAKISLALATVVSGESHGDHSKRVGGNGNLATKGGSSSCSSTSSVKRSRSFNAKHLLSWYSRSQRKPNAPLRSF

SEQ ID NO: 33294 - protein, 267 aa, Glycine max
  Clone ID: TF_GmC765_1.pep
MPTQPDSPPNNNTLTQMFQNIFSDNSNIMLAAIISLLLVILFVLLLHLYAKWFLAQAQAQANARRRRRRRRTTVTVSDVLGPARFHHFHSFTIEDSSPLSTKGLDSSTIRTIPLFIYEHNNNNNKKVEEEEEELECVICLSAFKNGEVGRCLPKCGHGFHVECIDMWLSSHSNCPICRTSIVASIVENNSSDDHHGGDHDLVEIVTEGGSAAPSFETREGEHGNSNNGNGGARTSVSVVSENSSSEFFGCSLERMLGKGFPISSNVN

SEQ ID NO: 33295 - protein, 249 aa, Glycine max
  Clone ID: TF_GmC248_1.pep
MALDQYFDEAVPQLDSLEDKSSLETWKCGSDDIADSDRNASGGFDCNICLECVQDPVVTLCGHLYCWPCIYKWLNLQTASSENEEEKQQCPVCKSEISQSSLVPLYGRGQTVLPSKGKGHQVGVVIPRRPLGPTLDSATVSPPISHVYHRHYPNHPQQFNSIPGSYTSMFNTGGSLANAFDTTYGVFGEMIYARVFGNQMTNTYTYPNSYDLSRNSNPRIRRHLMQVDRSLNRITFFLLCCIVLCLLLF

SEQ ID NO: 33296 - protein, 141 aa, Glycine max
  Clone ID: TF_GmC119051_1.pep
YGTEHHVNDPESDPVLLDAIPTLKFNQEAFSSLEHTQCVICLADYREREVLRIMPKCGHTFHLSCIDIWLRKQSTCPVCRLPLKNSSETKHVRPVTFTMSQSLDESHTSDRNDDIERYVEPTPTAASNSLQPTSGEQEARQ

SEQ ID NO: 33297 - protein, 353 aa, Glycine max
  unsure (1)..(353): unsure at all Xaa locations
  Clone ID: TF_GmC281_1.pep
YDIVLNSQLEKYEKARDVILSGLQVDPFSNSLRASLQNLESVSSSSRGMSTHGHPERNDDFDCTLCLKLLYEPVTTPCGHSFCCSCLFQSMDRGNKCPLCRTVLFISPRTCSISVTLKNIIQKNFPEEYAERKQEHDSLIKAGVDLLPLFVMDVVIPCQRFPLNIFEPRYRLMVRRIMEGNHRMGMAILDSTGSLAEFACEVEITECEPLPDGRFYIEIESRRRFRIIHSWDQDGYRVAEVEWIQDIMPPEGTSERDTLQQQTYNAVEDARSWIARAKEAARHDQRKLERLASVEVMMPSPKDPERFSFWXLATLSNRRPAERLDLLRIRDTAERIRRGLIFLRQEEQGCRIQ

SEQ ID NO: 33298 - protein, 420 aa, Glycine max
  Clone ID: TF_GmC281_5.pep
MASSLSPSPSSLDQTLRDVDDYVLENGSEGLSRDTLHYVYELVKNGNVAFRENRMEEAINFYSRANNIKSGDPIILSNRSAAYIRISQYFMHRTPSSSERRPLSGLEPTTLAELGLKDAEKLVELQSNSAKSYLLKANAFLLLEKYEKARDVILSGLQVDPFSNSLRASLQNLESVSSSSRGMSTHGHPERNDDFDCTLCLKLLYEPVTTPCGHSFCCSCLFQSMDRGNKCPLCRTVLFISPRTCSISVTLKNIIQKNFPEEYAERKQEHDSLIKAGVDLLPLFVMDVVIPCQRFPLNIFEPRYRLMVRRIMEGNHRMGMAILDSTGSLAEFACEVEITECEPLPDGRFYIEIESRRRFRIIHSWDQDGYRVAEVEWIQDIMPPEGTSERDTLQQQTYNAVEDARSWIARAKEAARHGNF

SEQ ID NO: 33299 - protein, 130 aa, Glycine max
  Clone ID: TF_GmC7141_2.pep
MLDSVLLALFLPCLGMSGVFIVYMCLLWYATTRRNQPPIDGQPVKPVTDKGLSALELEKLPKITGKELVLGTECAVCLDEIESEQPARLVPGCNHGFHVHCADTWLSKHPLCPVCRTKLDPQIFTSQSPC

SEQ ID NO: 33300 - protein, 274 aa, Glycine max
  Clone ID: TF_GmC111084_1.pep
MSFVFRGSRGDIESGFSEYVPERTLMRVHPARPVNGNSLAFLITVILIFMILNSPQMLHHFLLWVVLAIFVMATSLRMYATCQQLQAQARAHAAAASGLLGHTELRLHMPSSIAIATRGRLQGLRLQLALLDREFDELDYDTLRALDSDTASSTRSMTEEEINALPIHTYKVPVPPKDGSAGLASSSGAAEIKQASGGTEAGAKGSEDELTCTICLDQVKRGELVRSLPCLHQFHANCIDPWLRQQGTCPVCKLRIGSVSGGNRESESDGSDIA

SEQ ID NO: 33301 - protein, 184 aa, Glycine max
  Clone ID: TF_GmC1390_1.pep
FILIIIIIFFHTFVRFCRRRRRRLFSRSLPTNSSAAASLDDPCLDPSVIKSLPTFTFSAATHRSLQDCAVCLSEFADGDEGRVLPNCKHAFHAHCIDTWFGSHSKCPLCRTPVLPATGSADTEPGSVSEAGEGCSSSSLPPPIGCPRKPLDINIIIEIPEVERGSDSVTGDQGFRWSLKRFCNV

SEQ ID NO: 33302 - protein, 75 aa, Glycine max
  Clone ID: TF_6964406.pep
HALSDNLCISARNHSHGFSASECQANQASATSEECTVAWGVCNHAFHFHCISRWLKTRQVCPLYNSEWEFQKYGH

SEQ ID NO: 33303 - protein, 170 aa, Glycine max
  Clone ID: TF_GmC63868_1.pep
MGFPVGYAEVFFPNPFLHTLALLGLLRNLVFFLLHLLGFSDFLETEVAWPDHPHPSDEAAAARPPSASALLIRDLLPVAKFGDSDVGAQQNGLCAVCLFEFSEEEEVRCLRNCKHIFHRTCVDRWIDHDQKTCPLCRTPFVPDDMLDDYNQRLWAAFGVNEFYADYTFSF

SEQ ID NO: 33304 - protein, 189 aa, Glycine max
  Clone ID: TF_GmC646_1.pep
GSEQLSGVMPVSPAEDDITHSLINRDSFGHYNMGGIAEVLLALERIEQDAELTHEQILLLETNLFLNGLNFYDHHRGMRLDIDNMSYEELLALEERMGTVSTALPEEAFAECLKRSIYQSAYTHECCNEDKDDIKCCICQEEYVVGDEVGDLQCEHRFHVVCIQEWLRHKNWCPVCKVSAALSNSFLPH

SEQ ID NO: 33305 - protein, 118 aa, Glycine max
  Clone ID: TF_GmC2052_1.pep
MSPSPTNLLQQFQSRGLNFIVVQSLPTFQFKKNEREQDKTISVECAICLGEFEEGEWLKRLPHCSHSFHVSCIGTWFQSHSNCPLCRSFVHHHILQCSIASHTLLQPLRREDFERVQR

SEQ ID NO: 33306 - protein, 353 aa, Glycine max
  unsure (1)..(353): unsure at all Xaa locations
  Clone ID: TF_GmC324_1.pep
MKTHIHIALFLLLVSPLIPIAVAQAQSQPNDFSDANLNQFSPSIAIIIVILVVALFLMAFFSIYVRHCADSPSTTVSPLTTARSRRAARGLDPALIQTFPILEYSDVKIHKIGKEALECAVCLCEFEDTETLRLIPKCDHVFHPECIDEWLGSHTTCPVCRANLLPTDSEDAIANGNANGVVPVPETFTRDIEAQNDAVQAAPEQQNAEADPVLPEPEVVSLDKTLNRNRTRGSRSNRPRRXSQDTERLTLRLPEEVRKQILQNPQLHRARSLVILPREGSSRRGYRTGEGSSRGRSSRRLDRGFKSDRWVFTMAPPFLVRASSIRSPRVANNGGEGTSAAASLPPPPAVESV

SEQ ID NO: 33307 - protein, 228 aa, Glycine max
  Clone ID: TF_GmC322738_1.pep
MTLLILILLIIIIPSPSFSVTMQNSPTVLAVPPPRPATQINVIPIPPSFDGAPNSVFPSTFLPFPPPPPFAGPPSSVDLSPLEFLLALLAVVTIPALIYTFIFAFGCPSRRRRREPSYGEPSVASEVSHHQEFEIAAVADTEVKYRKEAHAKEIGGECPVCLSVFANGEEVRQLSACKHSFHASCIDLWLSNHSNCPICRATIAVTTTKTGDGDSHLSHREPDATNLV

SEQ ID NO: 33308 - protein, 381 aa, Glycine max
  unsure (1)..(381): unsure at all Xaa locations
  Clone ID: TF_GmC480_1.pep
MEVPEMEGKTESHMTSAAAFVEGGVQEACDDACSICLEDFCKSDPATVTNCKHEFHLQCILEWCQRSSQCPMYFLPISNRDXLRDSTSRELLEAVELERILNDETLRNFVILHHADFEYXDLPQGVKEADIEERIKPNXTAAAPMRRSRHLSRREGHRTRPSAHGRPHFLVYSTQPSAPPSAAGGGSEPAAIPVGSPSTPLTFDGNEQSSLQQIPHVQTQSSSLTSASTVSTTNLQGVHSDDRSFASHSFPASQDRAQPSEQSFSDSLRSRFNAVSMRYKDSISKGTRGWKERLFSPNSSMSELGSEVRRELNAKIASVSRLMERLETRENNSAAGTSLSNHLVNRSIAETSNQSNVEARGENSLHGNNTPTTFSASSDSK

SEQ ID NO: 33309 - protein, 154 aa, Glycine max
  Clone ID: TF_GmC5808_1.pep
MGLSSLPAPSEGVLCVLLVNTVLSISIFKGIVRTILHIVGIHLPSSSTSPSSPDPSQAAPESFELHLSPSESYIEEFRSRTPTLRFDSVCCSKRLEHDCSVCLTQFEPESEINRLSCGHLFHKVCLEKWLDYWNITCPLCRTPLMPEDDTPCFQ

SEQ ID NO: 33310 - protein, 155 aa, Glycine max
  Clone ID: TF_GmC134317_1.pep
MKPLSKLLNKLCGKMIMLLASLLIELIILIQKLRESRPISTRQYIKLIEKKNPTICYTKRFNLKAEHATECRVCLSEFEQGEKLRKLKCQHTFHRDCLDKWLQQYWATCPLCRKQVLPDDVVFKHRQHQNQPEAASNGNHDNLLYLFSAFRGGNT

SEQ ID NO: 33311 - protein, 156 aa, Glycine max
  Clone ID: TF_LIB5118-055-A1-PF1-D5.pep
MNNSTNNKGNNGFDPSEFTYGVAFVIGLIFLLVSIALACVRLRMARGPNMLNILAGIPPSRHARSSEEDNSAEQGLHHIDKSFERYPKLLYSQVEKGSSSSSVVSSSCSICLGDYKESDTLRLLPHCDHLFHLACVDPWLRLHSTCPICRKSSIHA

SEQ ID NO: 33312 - protein, 251 aa, Glycine max
  Clone ID: TF_GmC410_1.pep
MTSSLVKIQGEQVLTNDFQDLSIKDLSEKGTEAEIHKVGSYGSHGGICAICLDKIVLQETALVKGCEHAYCVTCILHWATYREKVTCPQCKHPFEFLNVHRSLDGSIQDYMFEESVCLLLRASWFTPLSVEEHVVHEDAYEDLEDYYQYEDDDDDDDMDEVYYGGSSSLRVIGNRRWGDNGYVRAGRQEARPVHRPNFQDSGASSSSHEPKKKEAGKIITGRRAKRAQKREAADKAAEAKHQQHLVRLGRK

SEQ ID NO: 33313 - protein, 179 aa, Glycine max
  Clone ID: TF_LIB5119-032-A1-PF1-B9.pep
MTSSLVKIQGEQVLTNDFQDLSIKDLGEKGSEAEIHEVGYGGHGGICAICLDKIVLQETALVKGCEHAYCVTCILHWATYREKVTCPQCKHPFEFLNVHRSLDGSIQDYMFEESVCLLLRASWFTPLSVEEHVAHEDVYEDLEDYYQYEDDDDMDEAYYGGSSNLRVIGNRRWGDNGYV

SEQ ID NO: 33314 - protein, 230 aa, Glycine max
  Clone ID: TF_700873011_FLI.pep
MTSGFGESTRASAPSPSCSGNSSNDAGDFECNICFDLAQDPVITLCGHLFCWPCLYRWLHHHSHSQECPVCKALVQEEKLVPLYGRGKTQTDPRTKLYPGMEIPHRPSGQRPQTMPPPPPPEVNPFGSYGFGLMGGFIPMATARFGNFTLSTAFGGFIPSLLNIHFHGFQDATVYGTTSGYPFGFNGFHGGNARGFMQATGQVQRQEDNVLKNLLMLIGFLVLLTVIFVW

SEQ ID NO: 33315 - protein, 230 aa, Glycine max
  Clone ID: TF_GmC543_1.pep
MTSGFGESTRASAPSPSCSGNSSNDAGDFECNICFDLAQDPVITLCGHLFCWPCLYRWLHHHSHSQECPVCKALVQEEKLVPLYGRGKTQTDPRTKSYPGMEIPHRPSGQRPQTAPPPPPPEANPFGSYGFGLMGGFIPMATARFGNFTLSTAFGGFIPSLLNIHFHGFQDATVYGTTSGYPFGFNGFHGGNTRGFTQATGQVQRQEDNVLKNLLMLIGFLVLLTVIFVW

SEQ ID NO: 33316 - protein, 313 aa, Glycine max
  Clone ID: TF_GmC25299_1.pep
MESEDLVKQELEELQKQLGKKQKFEASVSSLKTLLQRTYPSASPALRKSFYSVLCRVATVLKTRYTAPGFWNAGLGLFEQAHLLVSDPSEKEHLKACIAQAREHLHLEDNPSQTLRPADNQANRGYLFEGHLTVDPEPPQPQWLVQSNLLTTAATLFAAESSQASEANETTQDDATNMLEDLLNRLEEVVPLMVDVGPVAPKAPPASKEVVANLPVITLTEEILANLGKDAECAICRENLVLNDKMQELPCKHTFHPPCLKPWLDEHNSCPICRHELQTDDHAYESWKEREKEAEEERKGAENAIRGGEYMYV

SEQ ID NO: 33317 - protein, 355 aa, Glycine max
  Clone ID: TF_GmC285_2.pep
MADVTTYLRHHPDSDPNPNPNPNPNPNPDDDQTLIPFPYWDLDFDFDPEFPSNTLSFTDRENQVNFIMDLFHQSVEQSQLTDPLSNDAVFGAIDGIDLGFPAADDFFVGQRFSVGSDESHTHPHTLAANDDGVLGFCAHSNENDDVASIPLCWDALQLEENNNNNNTYEDFEWEEVMDERDVISMLDDTVSVSLGIEEETEAAAAEEDAESEVSILEWQVLLNSTNLEGPNSEPYFGDSEDFVYTAEYEMMFGQFNDNAFNGKPPASASIVRSLPSVVVTEADVANDNNVVVVCAVCKDEFGVGEGVKVLPCSHRYHGECIVPWLGIRNTCPVCRYEFPTDDADYERRKAQRSVM

SEQ ID NO: 33318 - protein, 213 aa, Glycine max
  Clone ID: TF_GmC342_1.pep
RKKKIGTIYPGNSGSWCLVFCFCLADSGSDDSQHLELPNLNKSSGSANECIPPNVGSGSFLLPSGNNAFLVEDTDGRPSCSLDTRRVSCKRKAVEGNNGQSSDAGSSSYSQHTDGSAWHTIPTQDNAGSSSRRSIPSEEVNARLGLGIGDEASENVSDSKTAGCSESFHRNFRLRLNPSNPANSVPPTAFSTGSMIRHSGVSILSSIPKTSFC

SEQ ID NO: 33319 - protein, 211 aa, Glycine max
  Clone ID: TF_GmC989417_1.pep
MKVSQYMLLVVLVWHSSLCANAQWNNPINYSPFDETNKGGNYSKVTWSVSLSCVFVSILVFILFKLRACCCCCYSSSSSQRHNTKLVAATEAIEKCPIFEYSTAKELKVGNGAEECSVCLVEFEDSDTIKMLPKCQHVFHQNCIDTWLPSRMTCPICRQKLTSQDTVIDIDDDDVVPMEQLEHDIGTEITESEVAVTDETDTGTVVEQVLV

SEQ ID NO: 33320 - protein, 185 aa, Glycine max
  Clone ID: TF_GM651B23rgnG1.C1.o45.ma.pep
MKVSQYMLLVVLVWHSSLCANAQWNNPINYSPFDETNKGGNYSKVTWSVSLSCVFVSILLVAATEAIEKCPIFEYSTAKELKVGNGAEECSVCLVEFEDSDTIKMLPKCQHVFHQNCIDTWLPSRMTCPICRQKLTSQDTVIDIDDDDVVPMEQLEHDIGTEITESEVAVTDETDTGTVVEQVLV

SEQ ID NO: 33321 - protein, 191 aa, Glycine max
  Clone ID: TF_GmC3662_188.pep
MAYPFSDFKYSDGLTVVGISFCTAIVCEAISWVLIYRTNSYKNLRSSIDKASKKLETMKTDSNKINIKKSKTKKIDRVETSLKESSRDLSLFKFKSGGVVALVLFVVFGLLNSLFEGKVVAKLPFKPFGLIMKMSHRGLQGNDPTDCSMAFLYFLCSISIRTNLQKFLGFAPPRGAGAGAGLFPMPDPKTS

SEQ ID NO: 33322 - protein, 306 aa, Glycine max
  Clone ID: TF_GmC730_1.pep
MSSGTTYWCYTCRQPIWLEGREAICPYCDGGFVQELNELRGVARQHGFSSRMEDAHQMPDIMDAVRAVMEQRGSEPRIRVRDAVDNFMRQRMAGRYTNFDVRRRSGSGSGSGSILIPDETWGVFSSGPYLIFHGQAPGFTNSNGSSRGGPRRVDFGDYFLGPRLEGLIEQHISNDRLGPPPASHSSIDAMPTIKITHEHLQSDSHCPVCKERFELGSEARKMPCNHVYHSDCIVPWLVLHNSCPVCRVELPPKEHTSSRGRRIWGNGSGSGSSNDISRGRENRQMNNGRRNLLSYLWPFRTSSSST

SEQ ID NO: 33323 - protein, 84 aa, Glycine max
  Clone ID: TF_GmC107734_1.pep
MVALPSVEVRHDGRECVICKEEMGIGRDVCELPCQHLFHWMCILPWMGKRNTCPCCRFRLPSDDVFGEIQRLWEVLVKMTAKDS

SEQ ID NO: 33324 - protein, 403 aa, Glycine max
  Clone ID: TF_GmC1165_1.pep
IYALSYFVCRFVYVELLEIRKDVQCPICLGIIKKTRTVMECLHRFCRECIDKSMRLGNNECPACRTHCASRRSLRDDPNYDALIAALYPDIEKYSQEELEFREEEKNRNKQIQASIAKVVQRQSEALVKRRKDTPGEFVTRPQRNQRNIHSRRQTQAIEGSEDNEEENDNNEKDSSSADERSTEHRQRRRKRWARVRPSQPSSSMTSPDGGCNDSDMDISKENRGISRQVSKHGKLTWGRGGFRSNTRHGSGGGSNSKSSRSSRLSKFVDHLRNLDENTDEFDVHLMLVSLDQLSTPSLQQPYLCCRPTLSVKHLYEHVARQTPLPVEGIEIVAVKGCCSTNCDKSADENSALAYDELSKLVIDPHKDELEILQGHETLAGLRSKCISKMGHLIIAYKQKEVS

SEQ ID NO: 33325 - protein, 250 aa, Glycine max
  unsure (1)..(250): unsure at all Xaa locations
  Clone ID: TF_GmC1801_1.pep
MGTGWRRAFCTRDPASTISDKHPGSPSPSPRTCTRLGFLSGGSNPSTPRLRCTTKAETASQTVTLSDSPRVQSKNTPRATKSPSVSNPTSPRSPLKLSLFKNSFKFRSSCGICLNSVKTGQGTAIYTAECGHAFHFPCIAAHVRKHGSLVCPVCKATWKDADAWADAWVAPESAEKDNVVAVQRNNNASPVFKTYNNHVEQPSKHSDSTRSYNDDEPLLSPPPAXRIIPIPEADENAEDDEDEDPGEFQG

SEQ ID NO: 33326 - protein, 221 aa, Glycine max
  Clone ID: TF_GmC1801_2.pep
SSCGICLNSVKTGQGTAIYTAECGHAFHFPCIAAHVRKHGSLVCPVCKATWKDVPLLAAHKNLAPESAAKDDVVAVQRVTESPYPNANDKKPTENNNASPVFKTYNNHVEQPSKHSDSTRSYDDDEPLLSPTSGGRIIPIPEADENAEDDEDEDPGEFQGFFVNPKNSSSSKSYSDSLQTSDGDSRTVQVKLMPECAVISASRTHETYALVLKVKAPPPPP

SEQ ID NO: 33327 - protein, 191 aa, Glycine max
  Clone ID: TF_GmC12487_1.pep
MGDVLSPFTISSPPPPSSPSTKSNSMPMLYYGLVVVGTAAIVLAIYNLVLLRRSHTRHALPSQSTGQNRDIVRVPEMRTRSFEDSQQRNLLSSFKYKKEVVAKEEEQEEEEQDDDEFECSVCLSVYEEGEEVRKLPQCKHYFHVLCIDMWLYSHLDCPICRTPVDVVGPLCPLENSPDGMMESGGGIPSSL

SEQ ID NO: 33328 - protein, 431 aa, Glycine max
  Clone ID: TF_GmC1017_1.pep
MGLGNDEEEDNNNNDKVVDDGDVGGGKSFGSVSCSICLEVVADNGDRSWSKLQCGHQFHLDCIGSAFNIKGAMQCPNCRKIEKGQWLYANGCRSYPEFSMDEWTHDEDLYDLSYSEMSFGVHWCPFGNLARLPSSFEEGEFSSSAYHDVLGQHAIFAEHTAVSSASHPCPYIAYFGPIHPSSSNSGGTVSEASNFNHWNGSSVPSDMPTSYTFPAVDLHYRSWEHHSPPFSTASSRLVAADQPSVSPGSQRPARGGSDVPRSGSFMHPFLVGHSSAARAGSSVASSMIPPYPGSNARARDRVQALQAYYQPQQPPNSTTMRTPIASGTRRSSSHNGPAQLAPMATSPDQGGGFFLIPSSSSGRNFQEENHHLPNHFHAWERDHLPSLSLNHVDRDSGWRAYHQATSRSDPATRSSSFRLRHGSDRMPSQNR

SEQ ID NO: 33329 - protein, 435 aa, Glycine max
  Clone ID: TF_GmC1017_2.pep
MGLGNDEEEDNNNNNNNNKNNNDKVVDDGDAGGGKSFGSVSCSICLEVVADNGDRSWSKLQCGHQFHLDCIGSAFNIKGAMQCPNCRKIEKGQWLYANGCRSYPEFSMDEWTHDEDLYDLSYSEMSFGVHWCPFGNLARLPSSFEEGEFSSSAYHDVLGQHAIFAEHTAVSSASHPCPYIAYFGPIHPSSSNSGGTVSEASNFNHWNGSSVPSDMPTSYTFPAVDLHYHSWEHHSPPFSTASSRLVAADQPSVSPGSQRPARGGSDVPRSGSFMHPFLVGHRVGSSVASSMIPPYPGSNARTRDRVQALQAYYQPQQPPNSTTMRTPIASGTRRSSSHNGSPQLAPITTSSDQSGGFFLIPSSSSGHNFQEENHHLPNHFHAWERDHLPSLSLSHVDRDSGWRAYHQATSRSDPGTRSSSFRLRHGSDRTPSQNR

SEQ ID NO: 33330 - protein, 364 aa, Glycine max
  Clone ID: TF_GmC480_2.pep
SSLHWVQEACDDACSICLEDFCKSDPATVTNCKHEFHLQCILEWCQRSSQCPMCWQPISLRDTTSQELLEAVELERSLRDTPSRNAAIFHHPALGDFELQHLPMAMNEADIEERIIQHLTAAAAMRRSHHLGQREGHRTRSSAHGRPHFLVYSTQPSAPPFAAGGESEPAAIPVGIPSTPLTFDRNEQSSPQQIPYFQTRGSSLTSGSTVATTNLQGVHSNDRRFASHSFPASQDRAQPSEQSFSDSLRSRFNAVSTRYKESISKGTRGWKERLFSPNSSMSELGSEVKRELNAKIASVSRLMERLETTRENNRAAGTSLSNPNHLVNCSIAETSNQNNVEARGENSLRDNSTPTTFSASSDSK

SEQ ID NO: 33331 - protein, 230 aa, Glycine max
  Clone ID: TF_GmC480_3.pep
MEVPEMEGKTESHVTSAEAFVEGGVQEACDDACSICLEDFCKSDPATVTNCKHEFHLQCILEWCQRSSQCPMCWQPISLRDTTSQELLEAVELERSLRDTPSRNAAIFHHPALGDFELQHLPMAMNEADIEERIIQHLTAAAAMRRSHHLGQREGHRTRSSAHGRPHFLVYSTQPSAPPFAAGGESEPAAIPVGIPSTPLTFDGNEQSSPQQIPIPQTRSSLTSGSTVAH

SEQ ID NO: 33332 - protein, 748 aa, Glycine max
  unsure (1)..(748): unsure at all Xaa locations
  Clone ID: TF_GmC12020_1.pep
MSILPSQTQAASSSSSSAPSPNPNSQHGIGIPIPQPFPSLSPSPINLTFGSLQISDTPGSSASAAQDSGGSSEKVTEVGSPSGVMVSPQQNSRTGSRSHGGRRTGMGTGTASYHRNQQTPGSVHSHGSAPSAGRKAQTVNGNYLLNFQYDPISRSQPRGPPPSPTTTRRHRKRKPYNKXLFLQANYKFMVLGLGNYSPESMDPDKMLQWEDIICVTYLTPFSVQCPICLEYPMCPQITTCGHIFCFRCILQYLLMGEEDHKGDSWKRCPLCFVMISAKDLYTLHITNVKQYQVGDNVEFTFLTRKKDSFTLSLKNKRETNTTSGVDGDICDPFSKFTLISDVDLSVKHAISDLDGWLARADSGLVDDLEKLPYVCAAMQQLEQRKRYWSEHRSHDSEKSSMIIDCGHQIPSTVANSMDTDDENCSNGSITSSSDFLDQNKVMMLDKSTAGACSDQNLDVEKELIEQEMNLSSSYEEKNDNQRHSEGVIGDVKENSSYSFYQAADGQHLILHPLNMKCLLHHYGSYDMLPHRISGRILQLETVTQTEAIRRRYRFLSHFPLTTTFQLCEVDLSEMLPPEALAPFIDEIKKRANQRKQLAKKEKKEKIKAEATAAYSLPISLSHQFTSRDDPPTFSMDDFEALGNSTISSSPPLAGERKSFSNVTRLGFAAAHDSPSLQIQETSGLHNNNRTSDSSVSTGLRNGETQSYSNVISRAESNISSNAPKTNELGKKGKKPNRVLLSTAGGRRY

SEQ ID NO: 33333 - protein, 331 aa, Glycine max
  Clone ID: TF_GmC5879_1.pep
MTTFTHSIFHHDLLFLFYFFLLTEFPPQATAQPPNTLTPPPQQDRFTRLKFDKSMAIVLLILVVVFFILGFLSVYTRQCAERRMGGRFDLSILISRRQRGLGREVIETFPTFVYSTVKSLKLGRATLECAVCLNEFEEVETLRFIPNCSHVFHSECIDAWLANHSTCPVCRANLFPKPDDPSFDPIQIPDPEQPVISSPTRAETGGSNPRSPNLIDQNPTSRSRSTGFRIAGWFPRSHSTGHSLVQPGENCERFTLHLPEEVRNQLMLSRTKSCGVGVTFTRENSERRGYRARSVGSSLSPHVRGWFSVKDDVGERSSDRLFSTSTRDSEV

SEQ ID NO: 33334 - protein, 134 aa, Glycine max
  Clone ID: TF_9903085.pep
VVLAVIVCAFLCALGLNTMLQCVFQCANRVLTEPLQWIASRRLNSGLKKREMVALPTSTYTHSCASPSSPSNNICAICLTEFSDGDRIRFLPNCNHRFHVDCIDKWLLSHSSCPTCRNLLKPTDSVHSLHTVVS

SEQ ID NO: 33335 - protein, 194 aa, Glycine max
  Clone ID: TF_GmC3662_37.pep
SFSWHYTELDDRDLEIRGRTLFFVIVLFSIILLVTVLFIYTRWVCRYQGRLPTTAFTAAAAHAPPLAQPQGMDPASIKKLPIILHHAPSDREESAWDETECCICLGEFRDGEKVKVLPACDHYFHCDCVDKWLTHHSSCPLCRASLKVESSFPGVRKGHIIFLNATCWIKVLKDVALLSHPCVWSTNWICGPAS

SEQ ID NO: 33336 - protein, 175 aa, Glycine max
  Clone ID: TF_GmC3662_86.pep
MSNPDTRSFNWHYTELDDRDLEIRGRTLFFVIVLFSIILLVTVLFIYTRWVCRYQGRLPTTAFSAAAVHAPPLAPPQGLDPASIKKLPIILHHAPADRDESVWDETECCICLGEFRDGEKVKVLPACDHYFHCDCVDKWLTHHSSCPLCRASLKVESSFPKILIQEPPLRIDFQF

SEQ ID NO: 33337 - protein, 336 aa, Glycine max
  Clone ID: TF_GmC1204_1.pep
MSSGATHWCYACRQPIVLDGRDPVCPYCDGGFVQELDELRGIAPNHNHTFSSQSGDFHQMPDIFDAIHAFMGQRGSDQRFGLMDAVDNFMRHRMAGRNSNFDVRGRSGSLPVPEQSWGVYSSGPYLIFHGQVPGFTLSAGSPRGGPRRVDFGDYFMGPGLEELIEQLTMNDQRGPAPAARSSIDAMPTIKITQAHLRSDSHCPVCKEKFELGTEAREMPCNHIYHSDCIVPWLVQHNSCPVCRVELPPQGQASSRGTRSWGGRNASNSSSSGSNDSSRGRENSHQNHGRRNPFSFLWPFRSSNSNNNHYSETGGSSSSTTPDQNNGTSYSGWPFDR

SEQ ID NO: 33338 - protein, 332 aa, Glycine max
  Clone ID: TF_GmC4746_1.pep
MAEERVPLVSLERVPLVSLDDGIVGARDSSSSSSSSTYQRYDIQQVAKWIEQILPFSLLLLIVFIRQHLQGFFVTICISAVMFKSNEIVKKQTALKGDRKVSVLLGISFAFMLHVISIYWWYRNDDLLYPLAMLPPKTPPPFWHTIFIILVNDTLVRQAAMAFKCLLLIYYKNGRGHNFRRQGQMLTLVEYTLLLYRALLPTPVWYRFFLNKDYGSLFSSLTTGLYLTFKLTSVVEKVQCFVSALKALSKKEVHYGVHATTEQVNAAGDMCAICQEKMQAPILLSCKHMFCEECVSEWFERERTCPLCRALVKPADLRTFGDGSTSLFFQLF

SEQ ID NO: 33339 - protein, 169 aa, Glycine max
  Clone ID: TF_GmC1492_1.pep
MGLQNQLNDVSSGSIPLLVLAQIATCVNYLRSMLFALLQTLGLSRFHSDQIVDERFLAAVGSGLAGLIMLSDQLTLSSQFFHHHHGTAAGHDHDHDHHPCVVCQATFEDGDQVRMLPCRHVFHRRCFDGWLHHYKFNCPLCRSPLFSDERVALTERRLGQQLISWFSLH

SEQ ID NO: 33340 - protein, 165 aa, Glycine max
  Clone ID: TF_GmC1492_2.pep
MGLQNQLNDVSSGSIPLLVLAQIATCVNYLRSMLFALLQTLGLCRFHSDQIVDERFLAAVGSGLAGLIMLSDQLTLSSQFFHHHHAGAGGHDHHPCVVCQATFEDGDQVRMLPCRHVFHRRCFDGWLHHYKFNCPLCRSPLFSDERVAVTERRLGQQLISWFSLH

SEQ ID NO: 33341 - protein, 778 aa, Glycine max
  Clone ID: TF_GmC1055_1.pep
MNSDNQQQSEEPGNAQKSLEHSADIAQPQSPNQTTAGTSTLTAEDTEKPKCAVCGEENAKMHYGVLACLGCKGFFRRALKKLNEYECLRNNNCIIDKQERNSCRSCRLQKCLDVGMDPAAVRPDRDFTGKQQLARRFSHSKGSSNHKSSQPMGKCSGERKGGGRDEETAGNWAHRLPVEMRTMVMTLQNIEAKVVHGDTAKDAAEIYPLRVNTIREIIEEPTKLRGRRTEMRYEPYRMAKNEEFSVIVYRRLIAAIDWVELLAERMGGLSIEDRIALVKSCFGPLTLFKCSARTAVVTSNENLLCLCNFAYVPREINKAYNDAYHLENGLVDRLLNELVAPFRKIHLAEEEIVCVSAIIVLNPMARDLSENAAEKVFQLRNRVYTTLYQIIKECRPNCNTNATFGNLLLYLPIITSLANAMSDNLRFAQTFSAHGGSPLLTSLFGCFPVEPFVDSEMALVKAVEGKCIAEKRVQTEEEKKIKAKEKKETVLQKQKRRKSDAGTQTEWKSQLNQITRKRRLCPLASVEESNEFHLLKAPCSYTLTEMFDDRINNCGVDEIEEEEEDNMEKNYGNNATLPFGTENRRLIRTTSYQQMHLQQGIDEQQEFRRPSATWTNAPSQNQSQSHGQQQTQNWPQPQQQQCWPTNSASTSKGIPAILPPTTQIQGLFLNEPSSSSQQQYFQGARQYGDSQWTVPPSSSMQMQSNFTPIYLPYSSSISPHFASNIPTQIHYSQSAAQYFPQQFAPSFYPPEPQSQQQFTYLTVNPQQQFFNDNNTNNN

SEQ ID NO: 33342 - protein, 873 aa, Glycine max
  unsure (1)..(873): unsure at all Xaa locations
  Clone ID: TF_GmC716_1.pep
MAEPLSNTELSSSKTLDPTNGHDSTSEPHQTAPEDAQLNREDDVVPTAKRKRDDDVEDRSLHPLWKTSLCSYFRSHNGSCSHGGACRYAHGEEELRPRPDNTWDPTSERAKKALKTESDEKRAVSEEVMMTEAVVDDGDDGCGANHALNICLVHLPRKWSSENLRTFLCEQGIPFKHAKKKKGMMIGFEIPFEDXKQLKSSTMELEGKSIGNKTVKVANVLPGSFEKKSNAIVNMSSAGLARHRAKSMPISEAFHPVKAMAVDLFPHTPHCELVMLLERFQILKKLTRNARKACPNGVSLPEWILKSREIGGLPCKLEGIIASPIVNGYRNKCEFSVGYSLEGKVTVGFMLGNFREGVTAVEEAVDCPNVSTVACKYATIFQEFLQDSDLPVWNRFKNTGFWRQLTVREGRTNGNVVDAETFSGVAEVMLIVSTASFDDAKVAAEFKRLAQAFVAGATSHCPILPLTALVVQDHQGISNVAPADAPLHSLPIPKAAGDPEVDENNNAKDVRIHDHINNLQFSISPTAFFQVNTLAAEKLYSLAGDWSCLGPDTLLFDICCGTGTIGLTLAHRVGXIGIEMNASAVSDAHRNAEINGIKNIKFICSKAEDVMGSLLREHLNVTKEQVDDPNISGKGNDSPEDSACPEPENGELASHCPENNNAEVGSEVQKGSTCEQADGISEQAEDVMGSLLRDDANMPKEQSDYPNISGSGNDIPEDSTFPVPENGETTSHSESNNAEVGGEVQKGSTSKNGKTSLQQFKNVVAIVDPPRAGLHPTVIKALRTHPGLRRLVYISCNPETLVANAIELCTPSPVKIEKGNKDNRGWRNMSSAGLARHRAKSMPISEAFHPVKAMAVDLFPHTPHCELVMLLER

SEQ ID NO: 33343 - protein, 64 aa, Glycine max
  Clone ID: TF_GmC706754_1.pep
HFAHGIGKLRPVIRHPRYKTEVCRMVLAGVVCPYGHRCHFRHALTEQEKAVVSQPKPRSMKLER

SEQ ID NO: 33344 - protein, 558 aa, Glycine max
  Clone ID: TF_GmC119109_1.pep
MAPRILLCGDVLGRLNQLFKRVSSVNKSAGPFDALLCVGQFFPDSPEQLEDFTKYIEGGSHFPLPTYFIGDYGVAAPKLLLQASKDSANQGFKMDGFKVCHNLYWLKGSGKFPLFGLSVAYLSGRKSSSGQQFGNYTEDDVDALRAIAEEPGVVDLFLTNEWPNGVTNRAADSDIPAGLSDGSDSTVSELVQEIKPRYHIAGTKGIYYAREPYSNVDAVHVTRFIGLASVGNRDKQKFIHAISPTPASTMSSTEIAMKTTNTTLSPYTFKEKRTSPMDSAKRSSDSISDPQYWRYDVAQKRQKHEAGHGDKLCFKFVSSGSCPRGEKCNFQHDTDAREQCMRGVCFDFLNKGKCERGPDCNFKHSLQDEGNRLPSRRPGSGRSKECWFCLSSPNVESHLIISIGENYYLALAKGPLVEDHVLIIPVEHMPSTLSMSSESEIELSRFQNSLKSYCKSQEKEVIFFEWVSVRGTHANIQAIPIPSSKAIMAEKIFNLAAQKLGFEFVTKKFDSISEGRKFLKAQIDGDSSLFYAQIPRGTILLHHVEEKEKIPCQFGREV

SEQ ID NO: 33345 - protein, 111 aa, Glycine max
  Clone ID: TF_GmC69531_1.pep
MSFSDHIPSFMMSPPSFSTDTDAIEVRLQFPTNNESLEPHSPQDQPPSFKRARTCDSSLSNAMACPPRMIQHPALNKGTSHIFFKTRICAKFRAGACRNGENCNFAHGLED

SEQ ID NO: 33346 - protein, 72 aa, Glycine max
  Clone ID: TF_uC-gmroLIB3258047g05a1.pep
TCPYGDHSQFAHGIGELRPVIRHPRYKTKVCKMVLAGVVCPYGHKCHFRHALTEQEKAVVSQPKPRSIKLER

SEQ ID NO: 33347 - protein, 127 aa, Glycine max
  Clone ID: TF_GmC1146_1.pep
MPVKKYYCDYCDKLFQDTPADRKRHVQGIQHHQAKARWYDSFKQQQIPPIPNRPLCFHFVNTGFCRYGDSCKYLHPVPNNNVQQPPIVTTPSPSPGSVVGVSFGNLPPSLQPPPDGVYLHLPFLDWG

SEQ ID NO: 33348 - protein, 124 aa, Glycine max
  Clone ID: TF_GmC1146_2.pep
RSITCDYCDKLFQDTPADRKRHVQGIQHHQAKARWYDSFKQQQIPPIPNRPLCFHFVNTGFCRYGDSCKYLHPVPNNNVQQPPIVTTPSPSPAARGGKWSLWTYSSKALLVFVNILSFSSLFLS

SEQ ID NO: 33349 - protein, 126 aa, Glycine max
  Clone ID: TF_GmC31054_2.pep
SCLQFQWRRQEIEACTSGCPFGEGCHFLHYVPGGFKAVSQLINVGSNPVTPQVGRNPVPPSFPDGSSPPVVKTRLCNKFNTAEGCKFGDKCHFAHGEWELGRPTAPSYEDPRVLGQMPSSRVGGRV

SEQ ID NO: 33350 - protein, 100 aa, Glycine max
  unsure (1)..(100): unsure at all Xaa locations
  Clone ID: TF_18691395.pep
AGLGGFSWPCAVFFGASGCAFGVGCPFLCCVGGGFSGVSQLVGGGGDPVIGHVGXCPVFFSFRGGSSAAVVKSRLCIEFHAGGGCKFGGSCSFAHGEWVL

SEQ ID NO: 33351 - protein, 184 aa, Glycine max
  Clone ID: TF_LIB4392-022-R1-K1-A7.pep
VVRDDLVVVDEDDDDGVAVRDDLVVVDEDDDDDGVVRNDVVVVVDVDGWNGSDEGCDWIENENVNESVFDKVGVEYKDERSSGKAQQYPLRPEAEDCAFYLKTGTCKFGFNCKFNHPLRRKNLAKNENAGEREEQEERSGQTECKYYLRSGGCKFGKACKFNHTRGKSSSASSTAELNFLGLPI

SEQ ID NO: 33352 - protein, 354 aa, Glycine max
  unsure (1)..(354): unsure at all Xaa locations
  Clone ID: TF_GmC1136_3.pep
EGVKGERSSGRAQQYPLRPEAEDCAFYLKTGTCKFGFNCKFNHPLRRKNQAKKENAGEREEQAERSGQMECKYYLRSGGCKFGKACKFNHTRGKSSSASATELNFLGLPIRVGEKECLYXRTGSCKFGANCRFNHPDPTTVGGGDSPSGYGNGSSISLQGVSQSSISSWSSTRPLNESAPFVPVILSPNPGVSPQSSEWNGYQAPVYLSERSLHPPSTYVMNNPAMESNVYMHHQKQMQVEEFPERPGEPECSYFLKTGDCKFKSNCKFHHPKNRIARLPPCNLSDKGLPLRPEQTVCTYYRRYGICKFGPACKFDHPPPSTMAGLDQQSSYTNSAGVDVAENGDADDGNQQSV

SEQ ID NO: 33353 - protein, 146 aa, Glycine max
  unsure (1)..(146): unsure at all Xaa locations
  Clone ID: TF_uC-gmroLIB3259P212a05a1.pep
DPNIRTIELEAFFVHIKRASNMVKHFSXPVSMFAPPKSTPGVPGAPAPPASKFKTQLCQNFPQGSCSFAERXPFAHGAVEKRKSGVGVCFSICISQGMVIMINIAVEGVRGYYMALRLSMDVRVMQYLGNVPKFFWAKAEKKKKKK

SEQ ID NO: 33354 - protein, 97 aa, Glycine max
  Clone ID: TF_GmC766_3.pep
MRDICRNFQRGSCQYGERCRYLHVQQQRKPNVNGFGGQSSSYQQQNTNPFGFGSGSQQQQQQKGNPFGFGKQNSSQLNGGPHSEHKPNQYKPFENKW

SEQ ID NO: 33355 - protein, 163 aa, Glycine max
  Clone ID: TF_jC-gmXLIB3563P064bf02d1.pep
NGRYFAGKQVSCQFVNLTRWKVAICGEYMKSGFKTCSHGTTCNFIHCFRNPGGDYEWADSDKPPPKFWVKKMIALFGYSDDYETSMEQGNMSLSKTDSDRTCHSRRRSRSREMDQLNCGHSGRRKQRDERKHRTPNEDWNGSFKRKSRGRTPDSGAVSDREWL

SEQ ID NO: 33356 - protein, 162 aa, Glycine max
  Clone ID: TF_LIB4164-024-Q1-K1-A7.pep
MLWQYYQRSGGCKFGKSCKYNHTRGKISTAPAPLLELNFLGLPIRPGERECPYYMRTGSCKFGANCKFNHPDPTAVGGGGGNPPSGYGNGGSISLQGVSQTSVPSWSSPRTLNEASPFVPMMLSPTQGVSTQSSDWNGYQVNRVNANNHIWQGTIYYIISTR

SEQ ID NO: 33357 - protein, 333 aa, Glycine max
  unsure (1)..(333): unsure at all Xaa locations
  Clone ID: TF_GmC1136_1.pep
EGRNSGGTQHYPLRPEAEDCAFYMKTGNCKFGFNCKFNHPIRRKTQAVKEKAGEREETTERSGMTECKYYQRSGGCKFGKSCKYNHTRGKISTAPXSAPLLELNFLGLPIRXGERDYYMSFSIQSVSLLICSLNWSXSTRTLNVLKTFGCAIDAFLSTSRYVYTGXISDWRIPQSGHLSIYLRGAFIPPSTSVMNNPAIDTNVYMHHQKQMPVDEFPERPGEPECSCFLKTGDCKFKSNCKFHHPKNRVTRLPPCNLSDKGLPLRPDQSVCSHYSRYGICKFGPACKFDHPINLQPVMIPGLEQQSYSNSASAGVAGIGGSTGVTDATIQQSV

SEQ ID NO: 33358 - protein, 139 aa, Glycine max
  Clone ID: TF_LIB3242-241-Q1-J1-A6.pep
SWRARRLSLSRSLVLNRLRPVASGGGKAQPGSPWWRSKGYRCIGGVLYKVSANKLSKTFGHPSDAGSRPLLRTGRLDPACSCSRSLASRAVQRSLAIIRQARQRTEKRKEYCMYYNRFGRCNRGERCPYMHDPEKVAVC

SEQ ID NO: 33359 - protein, 99 aa, Glycine max
  Clone ID: TF_GmC74310_4.pep
MDLYGRSPARNGPNPVNQPEWSSPGTDTALEESMWHLTLGGGESYPERSGVPNCVYYMRTGVCGYGGRCRYNHPRDRAAVAAAVRATGDYPERVGEPPC

SEQ ID NO: 33360 - protein, 233 aa, Glycine max
  Clone ID: TF_GmC568_1.pep
MIPNVQIPTWDADGGGALSPSISSNADTCSLFSSDHFRMFQFKVRNCPRGRSHDWTECPYAHPAEKARRRDPRKYHYSGTSCPDYRKGNCKRGDTCQFAHGVFECWLHPSRYRTQLCKDGTNCRRRVCFFAHTSDQLRVVTDSSSSSFVSSPTSVLINSSFSDSSPYSFVRGIVKLDEEGSYSGLTRCVFGSPRGGFMSVNGCEEEPAMERVESGRDIRARIYAKLSRENSIG

SEQ ID NO: 33361 - protein, 143 aa, Glycine max
  Clone ID: TF_GmC568_3.pep
MIPNVQIPTWDADGGGALSPSISSNADTCSLFSSDHFRMFQFKVRNCPRGRSHDWTECPYAHPAEKARRRDPRKYHYSGTSCPDYRKGNCKRGDTCQFAHGVFECWLHPSRYRTQLCKDRTNCRRRVCFFAHTSDQLRVVTDS

SEQ ID NO: 33362 - protein, 63 aa, Glycine max
  Clone ID: TF_GmC1146_3.pep
MPVKKYYCDYCDKLFQDTPADRKRHVQGIQHHQAKARWDFAATATLANISIPFPTTMSSSRQS

SEQ ID NO: 33363 - protein, 414 aa, Glycine max
  Clone ID: TF_GmC286_1.pep
MPENRQVLRNADSSDNIEAIRRLKINDNWDRDAAAQSTQYPDRPGEPECLYYLRTGACGYGSNCRYHHPAHISIGTHYGEELPQRAGQPDCEYFLKTGMCKYGSTCKYHHPKDRRGAAPVSFNTLGLPMRQEEKSCPYYMRTGSCKFGVACKFHHPQHASLGAYPLAGSPTPTSTIIPTSGLPYAGGFPAWSAVPRMSYLSGQGLQSYVPPFLSSSQGVIPVQSWNNYMGNMNPAMPNGFLGSNLVYDYMNLGESLFGGQAINSALPNRPDQPECRYFMSTGTCKYGSDCKFHHPKERMSQSLINPLGLPVRPGQAVCSYYRIYGMCKFGPTCKFDHPVLTIPQNYGLTSPAMNVLDTPLTRGLSNVQPPETSPSKLSDKKLQHSDAKAATEDSSKQDDTTLNSFPASAEPLHN

SEQ ID NO: 33364 - protein, 484 aa, Glycine max
  Clone ID: TF_GmC1128_1.pep
MERYGRASEGSQSDPSPEWTVAADADAGLEESSWQLGLPGAESYPMRPDEADCIYYLRTGFCGYGTRCRFNHPRDRAAVIGAAPRTGGEFPERVGQPVCQYYMRTGSCKFGASCKYHHPRQVPGTATPVPLNYYGYPLRVGQKECSYYVKTGQCKFGATCKFHHPQPAGVQVLAPSPVPPVSPLPVPVPSPMYPTVHPPSGPSQQQYGVLVARPPMLPGSVVQGPYGPMVVSPTMVPFSGWSPYQAPATNPLLPSSTTSNVGSTQLYGITQLPSSAATYTGPYQPSGSSIGPSGASQKEHPFPERPDQPECHHYMKTGDCKFGPLCRYHHPPDKSAPKANVTLSPVGLPLRPGAPPCTHYTQRGVCKFGSACKFDHPMGSLSYSPSASSLADMPVAPYPVGSSIGTLALSSLSSELRPELGAGSNKESVASRMSSMSTSTGSVGLTLSSVGPISHSSTQPSAQSSSSPETTSATTSSTVSHTSS

SEQ ID NO: 33365 - protein, 65 aa, Glycine max
  unsure (1)..(65): unsure at all Xaa locations
  Clone ID: TF_10236743.pep
YKTEMCKNWELRGACKFGDKCCFAHGRHELKGKALTHVKYKTKRCXQYHHSGYCPYGLRCQYLHK

SEQ ID NO: 33366 - protein, 295 aa, Glycine max
  Clone ID: TF_GmC16887_2.pep
MDVRKRGRPDVNLNGAVKKTKQELESLSSGVGSKSKPCTKFFSTAGCPFGEGCHFLHYVPGGYNVVAHMMNLKPAAPPPRTVAAPPPIPNGSAPSAVKTRICNKFNTAEGCKFGDKCHFAHGEWELGKPIAPSIDDHHHHRPLGPPAGGRMAGRIEPPPAMAGSFGAISTAKISVEASLAGAIIGKGGVNSKQICRQTGAKLSIREHESDPNLRNIELEGTFEQIKEASNMVKDLLLTVSMSAPPKSTPGVPGAPAPPGSNFKTKLCENFAKGSCTFGERCHFAHGAAELRKSGV

SEQ ID NO: 33367 - protein, 187 aa, Glycine max
  Clone ID: TF_GmC286_2.pep
MGNMNLAMPNGFLGSNLVYDYMNLGEPLFGGQAINSALPNRPDQPECRYFMSTGTCKYGSDCKFHHPKERISQSLINPLGLPVRPGQAVCSYYRIYGMCKFGPTCKFDHPVLTIPQNYGLTSPAMNVLDTPLTRGLSNVQPPETSPSKLSSDNKLQHSDAKAATEDSSKQDDTTSNSFPASAEPLHD

SEQ ID NO: 33368 - protein, 205 aa, Glycine max
  Clone ID: TF_GmC859_1.pep
VAQRSYKGRHCKKFYTEEGCPYGDSCTFLHDEQSKNRESVAISLGPGGYGGGGGGGGGVGGGASGGNGGANAAGNGPNSKPSNWKTRICNKWEMTGYCPFGNKCHFAHGATELHRYGSGLIEGENFDAASAVAGDTNKGVPSKASADNVVAAVTLVAHSDVYHIGVPSQRPSSMVIQRPGQRAHQKWKGPDKISRIYGDWIDDIE

SEQ ID NO: 33369 - protein, 297 aa, Glycine max
  Clone ID: TF_GmC1810_2.pep
MAEHLASIFGTEKDRVNCPFYFKIGACRHGDRCSRLHTKPSISPTILLSNMYQRPDMITPGVDAHGHPIDPRKIQDHFEEFYEDLFDELSKYGDIESLNVCDNLADHMVGNVYVQFREEEHAANAVRNLTGRFYAGRPIIVDFSPVTDFREATCRQYEENTCNRGGYCNFMHLKRISRELRRQLFGKSHGRHSRSRSRSPYRHRSHEERSHRSHSRKYDDRDHHHESRSRRHRSTSPRHRRGRSRSRSPGGRRHHSPVRDGSEEAIEHGQGMNEQFQLFDRGFCFQCLINFSSWNMK

SEQ ID NO: 33370 - protein, 268 aa, Glycine max
  Clone ID: TF_GmC1700_1.pep
MAEHLASIFGTEKDRVNCPFYFKIGACRHGDRCSRLHNRPSISPTLLLSNMYQRPDMITPGVDPQGQTLDPRKIQQHFEDFYEDIFTELAKFGEIESLNVCDNLADHMIGNVYVQFREEDQAAKALHALRGRFYNARPIIADFSPVTDFREATCRQFEENSCNRGGYCNFMHVKLIGRDLRRRLFGRNHRGGSGTYHRVSRSRSRSRSASPRYRRERRESDSRGGRRSRERDGSGGRRRQHGSPPAREGSEERRARIEQWNREREENK

SEQ ID NO: 33371 - protein, 182 aa, Glycine max
  Clone ID: TF_LIB4390-016-R1-K1-H3.pep
MAEHLVLIFGTEKDRVNCPFYFKIGACRHGDRCSRLHNRPSISPTLLLSNMYQRPDMITPGVDPQGQPLDPRKIQQHFEDFYEDIFTELAKFGDIESLNVCDNLADHMIGNVYVQFREEDQAAKALHALHGRFYNARPIIADFSPVTDFREATCRQFEENSCNRGGYCNFMHVKLIGRDLRR

SEQ ID NO: 33372 - protein, 248 aa, Glycine max
  Clone ID: TF_GmC1810_3.pep
MAEHLASIFGTEKDRVNCPFYFKIGACRHGDRCSRLHTKPTISPTLVLSNMYQRPDMNMNIITNPDQPQPQSLDPDKVQDHFDDFYEDLFEELSKYGPIQSLNICDNLADHMVGNVYVQFREEDHAANALMNLTGRFYSGRPIIVDFSPVTDFREATCRQYEENVCNRGGYCNFMHLKKISRDLRRKLFGRNRRWNGRSGSRSKSPPRNRNHGEHLHSGRGSGRRDFDRSHGHHGRRPRSRSPRYRGK

SEQ ID NO: 33373 - protein, 314 aa, Glycine max
  Clone ID: TF_GmC1810_5.pep
MAEHLASIFGTEKDRVNCPFYFKIGACRHGDRCSRLHTKPTISPTLVLSNMYQRPDMNMNIITNPDQPQPQSLDPDKVQDHFDDFYEDLFEELSKYGPIQSLNICDNLADHMVGNVYVQFREEDHAANALMNLTGRFYSGRPIIVDFSPVTDFREATCRQYEENVCNRGGYCNFMHLKKISRDLRRKLFGRNRRWNGRSGSRSRSPPRNRNHGENSHSGRGSGRRDFDRSHGPHGRRPRSRSPRYRGKRSRSPVGRDRSPPIRESSAERRAKIEQWNREKEQGDTGNMNNSKSSDDYQEQSVAQNGSESGNHQI

SEQ ID NO: 33374 - protein, 151 aa, Glycine max
  Clone ID: TF_GmC1810_1.pep
MAEHLASIFGTEKDRVNCPFYFKIGACRHGDRCSRLHTKPTISPTLVLSNMYQRPDMNMNIITNPDQPQPQSLDPDKVQDHFDDFYEDLFEELSKYGPIQSLNICDNLADHMVGNVYVQFREEVHAFSALMNLTWDSLIFGRHIIAVQLYR

SEQ ID NO: 33375 - protein, 203 aa, Glycine max
  unsure (1)..(203): unsure at all Xaa locations
  Clone ID: TF_LIB4392-021-R1-K1-A7.pep
MAEHLASIFGTEKDRVNCPFYFKIGACRHGDRCSRLHTKPTISPTLVLSNMYQMFYMNMNIITNPDQPQPQSLDPDKVQDHFDDFYEDLFEELSKYGPIQSLNICDNLADHMVGNVYVQFREEDHAANALMNLTGRFYXRQYEENVCNRGGYCNFMHLKKISRDLRRKLFGRNRRWNGRSGSRKQSPRESYHGGAFTFWSWFW

SEQ ID NO: 33376 - protein, 497 aa, Glycine max
  Clone ID: TF_GmC1557_1.pep
MEQYGRSSEGSRSDPSPEWAEPEAQTGLEEPVWQLGMGGGAGEESYPQRPDEVDCTYYLRTGFCGFGSRCRFNHPRDRAVVAGAERTAGEHPERVGQPVCQYFMRTRTCKFGSSCKYHHPRQAGAGGAAATPVSLNYYGYPLRQGEKECSYYVKTGQCKFGATCKFHHPVPAGIQIPPSPFAPVSPLPVPVPSPLYSTMQPPPGPSSQQIGVLVARPPMLPGSLVQSPYGPVVLSPAMVPISGWGPYQASASGAVLPSGTPSNVGSAQLYGITQLPSPAAAYPGPYPPSGSPVGPPSSSQKEQAFPERSNQPEYQYYLKTGEVKFGPSYRYNPPPDMSVPDMSTPKANVILSPAGLPLRPGLKLKSGAPACTHYAQHGVCKFGSACKFDHPMGSMSYSPSASSLADMPVAPYPVGSTIATLAPSSSSSELRPEPSSGSSKESVPSRMPSSTLTGSIGSTLSTGGPISQSSTQPPSQSSGPLAAVTSTTSSNVSHTSS

SEQ ID NO: 33377 - protein, 422 aa, Glycine max
  Clone ID: TF_GmC825_1.pep
VWENNNNNHNLIVPNPQDSLWMMNLRTGETMDSGSYPERPGEPDCSYYMRTGLCRFGATCRFNHPPNRKLAIATARMIGEFPERIGQPECQYYLKTGTCKFGATCKFHHPKDQAGIAGRVALNILGYPLRPNEPECTYYLRTGQCKFGNTCKFHHPQPSNMMLSLRSSPVYPTVHSPTTLGQQSYAGGTYIPSPRWQGPSSYAPLILPQGVVSVPGWSAYSGQMGSISTSDSPQQAMRNGQTYGTSRQGELAGSQGAYSQFRSGTVPVGFYTLQRENIFPERPGQPECQFYMKTGDCKFGAVCRFHHPQERLVPAPNCVLSPIGLPLRPGEPLCVFYSRYGICKFGPSCKFDHPMEIFSHNISASPSADAPSRHLLGSSSGTAALNLSSEGLVESSSAKPRRLSLSETRQIPSGDDDIDDDG

SEQ ID NO: 33378 - protein, 471 aa, Glycine max
  Clone ID: TF_GmC74310_1.pep
MDLYGRGQARNGSNPVNQPECRSPGTDTGLEESIWHLTLGSGESYPERPGVPNCVYYMRTGVCGYGSRCRFNHPRDRAAVAAAVRATGDYPERVGEPPCQYYLKTGTCKFGASCKFHHPKNGGGYLSQAPLNIYGYPLRLGEKECSYYLKTGQCKFGISCKFHHPQPAGTSLPTSAPQFYQQVQSPTVPLPEQYGGASTSLRVARPPVLPGSYVQGAYGPVLLSPGVVQFPGWSHYSAPVSPVLSPGAQPAVGATSLYGVTQLSSPTSAFARPYTPLSSTTDPSGSNPKDQFFPERPGEPECQYYLRTGDCKFGLACRYHHPRDHIVARPLLSPVGLPLRPGLQPCAFYLQNGHCKFGSTCKFDHPLGSMRYSPSASSLIDVPVTPYPVGSLLSQLAPSTTSSDLRPELMSGSKKESFSARIPSSGNSSGTSVGLIFSQGGSVSLFDVQLSSQSNAPPNSSRSTRQSGEIR

SEQ ID NO: 33379 - protein, 210 aa, Glycine max
  Clone ID: TF_GmC122_2.pep
ISCKYGVTCRYNHPDRNGMYNILILIVLTFSCFLNNYFALSFFDAAINPPIAGLGASIFPSSAANLNIGLLNPAVSVYQAFEPRLSNPMSQVGIADTIYPQRPGQIECDFYMKTGECKFGERCKYHHPIDRSAPSLSKQATVKLTPAGLPRREGAVICPYYLKTGTCKFGATCKFDHPPPGEVMEMAKSQGTSANGGEAEGDEIETSAQL

SEQ ID NO: 33380 - protein, 209 aa, Glycine max
  Clone ID: TF_GmC86_1.pep
MANYLASIFGTEQDKVNCSFYYKIGACRHGDRCSRKHVKPSYSQTILLPNLYQNPAYDPKNKMNPQQMQMHFDAFYEDIWCELCQYGLAEELVVCDNNNDHLIGNVYVRFKYEEDAQKACDALNSRWYAGRPIYCELSPVTDFREACCRLNSGEGCVRGGFCNFIHRKEPTAELDRELDMCTRKWLKERGRDARSMSRSPTPPATKNRF

SEQ ID NO: 33381 - protein, 610 aa, Glycine max
  Clone ID: TF_GmC122_1.pep
MENHIYASSYSPSTNYRSFRDPPADTMFLSHHLHHHRTDASSAAALRFPSSALSAVEAADIAPPGVTSRIASSSAAADDENFLSTWPPAAAAAPFALDLKRSSEALYHPTILGTIGQSEAWYSTNPLAKRPRYESASNMTIYPQRPGEKDCAHYMLTRTCKFGDSCKFDHPFWVPEGGIPDWKEVPIVTSETPPERPGEPDCPYFLKTQRCKFGSKCKFNHPKVSSENADVSSGLPERPSEPPCAFYMKTGKCRYGAACKFHHPKGDSCKFDHPVWVPEGGIPDWKEAPNVVTSETPPARPGEPDCPYFLKTQRCKFGSKCKFNHPKVSSENADVSSGLPERPSEPPCAFYMKTGKCRYGTACKFHHPKDIQIQLSDDLSQNVAQTQTNSMMGGATGDTQPIKSLISPSLQNSKGLPVRLGEVDYHPYMKTGTCKYGVSCRYNHPDRNAINPPIAGLGASILPSSAANLNIGLLNPAVSAYQAFEPRLSNPMVGIAETIYPQRPGQIECDFYMKTGECKFGERCKYHHPIDRSALSLSKQATVKLTPAGLPRREGDVICPYYLKTGTCKFGATCKFDHPPPGEVMEMAKSQGTSANGEEAEGDTSALEQL

SEQ ID NO: 33382 - protein, 296 aa, Glycine max
  unsure (1)..(296): unsure at all Xaa locations
  Clone ID: TF_GmC16887_1.pep
MDTRKRGRPEPGFSLNGGFKKSKQEMESLSTGVGSKSKPCTKFFSTAGCPFGEGCHFLHYVPGGYNAVAHMMNLTPAAPPASRNVAALPPVPNGSAPPAVKTRICNKFNTAXEGCKFGDKCHFAHGEWELGKHIAPSFDDHRTMGPTGVGRLAGRMEPPPGPAASFGANATAKISVEASLAGAIIGKGGVNSKQICRQTGAKLSIREHESDPNLRNIELEGSFEQIKEASNMVKDLLLTLQMSAPPKTTPGVPGAPASHGSNFKTKLCENFTKGSCTFGDRCHFAHGAAELRKSGV

SEQ ID NO: 33383 - protein, 316 aa, Glycine max
  Clone ID: TF_GmC1136_2.pep
DDGWNGGGDEGCDCIENVNVNESESDKVGGDVEGVKGDRSSSRAQQFPLRPEAEDCAFYLKTGTCKFGFNCKFNHPLLALASAHVIGALSFPRTNRQAKKESAPINGGSCKFGANCKFNHPDPTAVGGGGGNPPSGYGNGGSISLQGVSQTSVPSWSSPRTLNEASPFVPMMLSPTQGVSTQSSDWNGYQASVYLPERSIHPPSTFVMNNPAIDTNVYMHHQKQMPVDEFPERPGEPECSFFLKTGDCKFKSNCKFHHPKNRVTRLPPCNLSDKGLPLRPDQSVCSHYSRYGICKFGPACKFDHPDKLAARDDSWT

SEQ ID NO: 33384 - protein, 297 aa, Glycine max
  Clone ID: TF_GmC31054_1.pep
MDRKRGRPEAAFNFNGGAKKSRPETDSFPTGLGSKSKPCTKFFSTSGCPFGEGCHFLHYVPGGFKAVSQLINVGSNPVTPQVGRNPVPPSFPDGSSPPVVKTRLCNKFNTAEGCKFGDKCHFAHGEWELGRPTAPSYEDPRVLGQMPSSRVGGRVEPPHPAHGAAASFGASATAKISINASLAGAVIGKNGVNSKQICRVTGAKLSIRDHDTDPNLRNIELEGSFDQIKQASAMVHEVILNVSSASGPPMKSFTSQTSAPTSNFKTKLCENFAKGSCTFGERCHFAHGNDELRKSGM

SEQ ID NO: 33385 - protein, 187 aa, Glycine max
  Clone ID: TF_GmC16887_3.pep
FNTAEGCKFGDKCHFAHGEWELGKHIAPSFDDHHAMGPPGAGRLAGRMEPPGPAASFGANSTAKISVEASLAGAIIGKGGVNSKQICRQTGAKLSIREHESDPNLRNIELEGSFEQIKEASNMVKDLLLTLQMSAPPKTTPGVPGAPASHGSNFKTKLCENFAKGSCTFGDRCHFAHGASELRKSGV

SEQ ID NO: 33386 - protein, 150 aa, Glycine max
  Clone ID: TF_GmC104291_2.pep
MEGTATGCYKCGRPGHWSRDCPFSAPNSNPNPNPNPNPNPATTPNPNTPNPSSSSFKPRFAAEKPKKLPRTKPKLTPELLLSDEGLGYVLRYFPREFKYRGGGHEVRDLGNLLRLYTEWHSRLLPYYSFNQFVHKVEKVAATRRVKTCLR

SEQ ID NO: 33387 - protein, 173 aa, Glycine max
  unsure (1)..(173): unsure at all Xaa locations
  Clone ID: TF_GmC18165_1.pep
MSRVYVGNLDPRVSERDLEDEFRIYGVLRSVWVARRPPGYAFIEFDDRRDALDAIQALDGKNGWRVELSHNSKGGGRGGRGRGGEDTKCYECGEPGHFARECRLRIGSRGLGSGRRRSPSPYRRRTSPSYGXSYSPRGRRSPRRRSISPPWGRNYSRSPSYRPLRDFPYANAD

SEQ ID NO: 33388 - protein, 134 aa, Glycine max
  Clone ID: TF_GmC18165_2.pep
GFSVWVARRPPGYAFIEFDDRRDALDAIQALDGKNGWRVELSHNSKGGGRGGRGRGGEGTKCYECGEPGHFARECRLRIGSRGLGSGRRRSPSPYRRRRSPSYGYDRRSYSPRGRRSPRRRSISLPRGRSYSRM

SEQ ID NO: 33389 - protein, 177 aa, Glycine max
  Clone ID: TF_GmC18165_3.pep
MSRVYVGNLDPRVSERDLEDEFRIYGVLRSVWVARRPPGYAFIEFDDRRDALDAIQPVDGKNGWRVELSHNSKGGGRGGRGRGGEDTKCYECGEPGHFARECRLRIGSRGLGSGRRRSPSPYRRRRSPSYGYDRRSYSPRGRRSPRRRSISLPRGRSYSRSPPYRPSRHDSPYANAM

SEQ ID NO: 33390 - protein, 222 aa, Glycine max
  unsure (1)..(222): unsure at all Xaa locations
  Clone ID: TF_GmC629454_1.pep
RNLPGFNPNTRHCLYGLDADLIMLSLATHEVHFSILREVVTFPGQQEKCFLCGQPGHFAADCRGKPGEKAEDWNPPEXNTPFHKKKYXQFLNIWVLREYLQFELEIPNPPFEIDFERVVDDFVFLCFFVGNDFLPHMPTXEIREGALNLLMHIYRKEFTAMGGYLTDAGEVFLERVQHFIQSVAVHEDQIFQKRVRIQQATEINEEMKARARGDMPGEHVLS

SEQ ID NO: 33391 - protein, 464 aa, Glycine max
  Clone ID: TF_GmC5288_3.pep
MMKSSDAANEKLLENGTSSSQIKKGGLRTMPFIIVNECLEKVASYGIMPNMILYLRDDYLMPIAKGTSVIYTWTAASDVLSLFGAFLSDSYLGRFLVIAIGSFSSLLEHEMELLRLHQNEENDKKKKGIALKASSSIQEESDQDNDADDDDDLSFFVKRFNKFLKVRGNQRRPNFKSKRRTKNSSSTLKCFECNQPGHLRVDCPIFKKKMEKSEKKNHSEKKLKKAYITWDENDLESSDDSENEEINLCLMAKSYESDEEVTSSNNLSISFDELQDAFADLHKESIKLAKLVSSSKKTISNLENEISKLNKELDLLRNEVSISKTNEKVNISTISDKKISDSCSCCDKYVKEIKELKNSLAKFSYSKNNLDVILSKQRYVSNKNGLGYKSEKQQKFHKNFSTSTQKCNSNSITCFYCGRRGHGISTCYFKKNYSNIKMIWVPKGSSVYTNMQGPNKVWVPKSKT

SEQ ID NO: 33392 - protein, 55 aa, Glycine max
  unsure (1)..(55): unsure at all Xaa locations
  Clone ID: TF_LIB4392-013-R1-K1-A12.pep
IHXDFSQSVATLWSQYRRKDQKGKGGGCFKCGSTDHIAKDCTGEAMKQPQQIHLK

SEQ ID NO: 33393 - protein, 109 aa, Glycine max
  Clone ID: TF_GmC10165_2.pep
DFYGKFSDRDRSNPRGSRDQRGFRSSRGREGGQDSNDEFGRGGRSFRSGNNRSRTTGKSSGNDWLIGGSSRSSRFSSSNRDGGHGGACFNCGKPGHRASDCITQKRVFF

SEQ ID NO: 33394 - protein, 385 aa, Glycine max
  Clone ID: TF_GmC137024_1.pep
RPRVRPRVRLKSKYLSTLLSATSFDADGGLFPLAFGVVDVENDDSWTWFLSELHKVLEVNTECMPEFIFLSDGLNSITDAVRRKFPSSSHAFCMRHLTESIGKEFKNSRLVHLLWKASYSTTTIAFKEKMGEIEEVSPEAAKWLQQFHPSQWALVHFKGTRFGHLSSNIEEFNKWILDTRELPIIQVIERIHSKLKTEFDDRRLKSSSWCSVLAPSAEKLMTEAIDHASTYQVRLDDEVEFEVLSADRSDIVNIGSHSCSCRDWQLNGIPCSHATAALISCRKDVYAFTQKCFTAASYRNTYAEAIHHIPGKLEWSKTDDKSSMDDNILVVRPPKLRRPPGRPEKQMCVDDLNREKHTVHCSRCNQTGHYKRTCKAEMINSIEQF

SEQ ID NO: 33395 - protein, 81 aa, Glycine max
  Clone ID: TF_LIB3049-042-Q1-E1-G10.pep
TLQGCRKNMKETAPGCYNCGKPVHWSRDCPFSAPNSNPNPNPNPNPNPATTLNPNTRNPSSSSFKPKIPGEKPKKLPRTKP

SEQ ID NO: 33396 - protein, 1380 aa, Glycine max
  Clone ID: TF_GmC988635_1.pep
MATNSHFPAIFPILDGRNYDQWSRKMKAILGYQDVWDLVQNGLIPLPENANAAQQTVYRESKKEDWKGLCILHQCVNPAIFEKIARSETSKEAWDILANSYAGDQKLKKVRLQTLRRQYELLGMEESESIAAYFTRVQTMTNQMLYCGETLSDESIVEKILRSVSSRFDHITVAIEQAKDLSTMTIEELQGSLEAHEQRMNEKKTVKPSTEQALAAQTGNKSGGNQRGRGRGRNNYRGGRGRGNYNNSNSAKVNSSENSSNNKQGNNHTENYRGRGGRGFRGRGRKFDKSYIQCYNCGRYGHFADECYSNVNGNDAKMAEEEEETEETLLMAIEEKKSSDETVQMVSIKKEGENGEYWVLDTGCSTHMTGRREWFVELDFTIKSRVRFADDRTMKVEGVGKVMIRKKDGSLCYITGVLYVPGMKSNLLSIGQLLEKGYRMVLEDKAMKVYDTEHNLLMKGILSNNRIFKIELGMLLQQCLATAVDKEEWLWHFRYGHLNFGDLNRMQSKAIVKGLPHIHVPKDVCAECMESKMSRGAFNPNVPSRSKRKLQVIFSDVCGPIQHETPAGNKYFVTFIDDFTRKLWIYLIKRKNEVLGVFKKFKVLVEKQSGQNIEILRTDGGGEYVSTEFDEYCENEGITHEVTPPYTPQHNGVAERKNRTLLNMVRSMLKSKNMPKMWWGEAVNTAAYIINRSPTKKMENITPEEAWTGVKPNVSHFRVFGSVCYRHVPDQLRTKLDDKGEVMIMVGYHSTGGYKLVNPVNNKIVISRDIVFDEGKAWKWSEKRESSTGVEQNLFDVPAGETESDIEGETGPVEDNDDEGGSPEMPRRSLRQRQVPARLNDYEIMPDGAIDDEGNLVHFALLAETEPVTLQEAMKNSKWLEAMKEELRSIEKNLTWELVELPKGKKAIGVKWVYKVKVNPKGEVVKYKARLVARGFLQRHGVDYEEVFAPVARIETVRVVVAHASMQRWKVHQLDVKSAFLNGELEEEVYVEQPAGFVKQGSEKKVLKLRKALYGLKQAPRAWNKKIDKSLINMGYVRCISEHGVYVKSGGGDIVILCLYVDDLLVTGNNETKVTEFKRKMMSTFEMTDLGEISYFLGIEFQNTSDGVLLSQKKYVSDVLKRFNMQHCNGAATPAEAGLWLDKNVDEPEVDATEFRQVVGALRYLCNTRPDIAFSVGLISRVMDRPRTSHLAAAKRILRYVKDTMAYGILLPSKCRENEKGLYGFTDADWGGDKTDRKSTAGSVFLLGSGPISWSSKKESVVALSSCEAEYIAASMGGCQAIWLDNLMQELMIKKESVVELFVDNKSAISLAKHPVAHGRSKHIETRYHFLRDQVTKGRLKLSYCRTDMQVADIFTKAVKRETFKKLRNILNVVDCNEFV

SEQ ID NO: 33397 - protein, 1342 aa, Glycine max
  Clone ID: TF_GM436D07rgnG8.C1.o10.ma.pep
MATNSHFPAIFPILDGRNYDQWSRKMKAILGYQDVWDLVQNGLIPLPENANAAQQTVYRESKKEDWKGLCILHQCVNPAIFEKIARSETSKEAWDILANSYAGDQKLKKVRLQTLRRQYELLGMEESESIAAYFTRVQTMTNQMLYCGETLSDESIVEKILRSVSSRFDHITVAIEQAKDLSTMTIEELQGSLEAHEQRMNEKKTVKPSTEQALAAQTGNKSGGNQRGRGRGRNNYRGGRGRGNYNNSNSAKVNSSENSSNNKQGNNHTENYRGRGGRGFRGRGRKFDKSYIQCYNCGRYGHFADECYSNVNGNDAKMAEEEEETEETLLMAIEEKKSSDETVQMVSIKKEGENGEYWVLDTGCSTHMTGRREWFVELDFTIKSRVRFADDRTMKVEGVGKVMIRKKDGSLCYITGVLYVPGMKSNLLSIGQLLEKGYRMVLEDKAMKVYDTEHNLLMKGILSNNRIFKIELGMLLQQCLATAVDKEEWLWHFRYGHLNFGDLNRMQSKAIVKGLPHIHVPKDVCAECMESKMSRGAFNPNVPSRSKRKLQRKNEVLGVFKKFKVLVEKQSGQNIEILRTDGGGEYVSTEFDEYCENEGITHEVTPPYTPQHNGVAERKNRTLLNMVRSMLKSKNMPKMWWGEAVNTAAYIINRSPTKKMENITPEEAWTGVKPNVSHFRVFGSVCYRHVPDQLRTKLDDKGEVMIMVGYHSTGGYKLVNPVNNKIVISRDIVFDEGKAWKWSEKRESSTGVEQNLFDVPAGETESDIEGETGPVEDNDDEGGSPEMPRRSLRQRQVPARLNDYEIMPDGAIDDEGNLVHFALLAETEPVTLQEAMKNSKWLEAMKEELRSIEKNLTWELVELPKGKKAIGVKWVYKVKVNPKGEVVKYKARLVARGFLQRHGVDYEEVFAPVARIETVRVVVAHASMQRWKVHQLDVKSAFLNGELEEEVYVEQPAGFVKQGSEKKVLKLRKALYGLKQAPRAWNKKIDKSLINMGYVRCISEHGVYVKSGGGDIVILCLYVDDLLVTGNNETKVTEFKRKMMSTFEMTDLGEISYFLGIEFQNTSDGVLLSQKKYVSDVLKRFNMQHCNGAATPAEAGLWLDKNVDEPEVDATEFRQVVGALRYLCNTRPDIAFSVGLISRVMDRPRTSHLAAAKRILRYVKDTMAYGILLPSKCRENEKGLYGFTDADWGGDKTDRKSTAGSVFLLGSGPISWSSKKESVVALSSCEAEYIAASMGGCQAIWLDNLMQELMIKKESVVELFVDNKSAISLAKHPVAHGRSKHIETRYHFLRDQVTKGRLKLSYCRTDMQVADIFTKAVKRETFKKLRNILNVVDCNEFV

SEQ ID NO: 33398 - protein, 240 aa, Glycine max
  unsure (1)..(240): unsure at all Xaa locations
  Clone ID: TF_GmC121484_1.pep
SSRIGSRKNPAFKPPADYRPPKLQKKLYIPMKEYPGYNFIGLIIGPRGNTQKRMEKETGAKIVIRGKGSVKEGRLQQKRDLKPDPSENEDLHVLVEAETPESLEAAAGMVEKLLQPVDEVLNEHKRQQLKELAALNGTIRDEEYCRLCGEPGHRQYACPTRTSTFKSEVVCKHCGDGGHPSIDCPVKGATGKKMDDEYHNFLAELGGSVPESATKQTSTLAVGAGTSXGSNPPWANNFNT

SEQ ID NO: 33399 - protein, 313 aa, Glycine max
  unsure (1)..(313): unsure at all Xaa locations
  Clone ID: TF_GmC79463_1.pep
KKQDLKTMTIKQLMGSLQAYEEKQKRKIKQKEATEQLLQLNVKEANYANYKSQRGRGRDQDRGRGRGHGGEGRGGXKNHSNKFNNGERSWNPQVTRGRGRGNSWSRYDKSQIKCFNCNKIGHYASECRFSKKVEEKANFVEEKGGEEETSLFACQNKFEEKRNKWYLDTGASNHMCGDKSMFVEINEAATGDVSFGDDSKIPVKGKGKILIRLKNGSHQFISNVYYVPNMKNNILSLGQLLEKGYDIHLKEHSLFLRDCRHNLIAKVPMSKNRMFLLNIXNDVTKCLKACYTDSSWLWHLWFGHLNEDGLEST

SEQ ID NO: 33400 - protein, 807 aa, Glycine max
  unsure (1)..(807): unsure at all Xaa locations
  Clone ID: TF_GMCosmidSEREIS.C1.o2.np.pep
MARKSMYILYNKEIATLDSDLELPSGVKSILQEFQDMFSKEMPQGLPPLRGIEHQIDLVLGAVLPNRPTCRSNPQETXEIQKXVTDLMTKGWVEESLSPCIVPIILVPKKDESWRMCSNCRAVNNITIKYMHPIPRLDDLLDELYGSCYFSKIDLKSGYNQIRIREGDEWKTAFKTKYGLYEWKVMPFGLTNAPSTFMRLMNHVLREFLGKFVVVYFDDILVYRKNLDEHLQHLKSILHVLRKQRLYANLEKCTFCKDHVVFLGFVVNSSRVHVDKEKIKAIQEWPIPKNVSEVRSFHGLASFYRRFVKDISTIVAPLNELVMKHARFKWGEEQEKTFFVLKEKLTNAPILALPNFAKSFELECDASEVVADALSRSYALLYTLEAKFLGFECIKELYEHDADFSHIYQTCYPIAFDGYFKHDGYLVKDKRLCVPKSSIKEVLIKEAHXGGLMGHFGVQKIYDILHEHFYWPHMKSDVHSLCNKCLVSKKAKSKVKPHGLYTSLPIPEHPWIDISMDFVFGLPRSKGGKDSIFVVVDRFSKMAHFISCKKVDDACHVVDLFFKEVVRLHGLPRSIVSDRDSKFLNHFWRTLWGKIGTKLLFSTTCHPQTYGKTEVVNINLSTLLRAVIKKNIKTWEECLPHVEFACNRVVHSTTQLSPFEIVYGFNPLTPLDLLPLPDXHNLKISLGXVKAEYVKKMHEKVKSQIEKKMEGYAKYANKGRKKVTFERSDWVWVHFRKEWFPSQRKSKLMPRGDGPFQVLARINDNAYKIDLPREYGVSATFNVVDLTLFDAGDDFRDLRANACQEGG

SEQ ID NO: 33401 - protein, 184 aa, Glycine max
  Clone ID: TF_GmC9855_12.pep
MSRVYVGNLDSRVTERDLEDEFRVFGVIRSVWVARRPPGYAFIDFDDRRDAQDAIRELDGKNGWRVELSHNSRGGGGGRGGRSGGSDLKCYECGEPGHFAREYRMRGGSGRRRSRSGRRFRSSPSYGRRSYSPRYGRSPCGRSPRHRSLSPRGCSYSRSPPYCGREEVPYANGNGLRELRRSRS

SEQ ID NO: 33402 - protein, 496 aa, Glycine max
  unsure (1)..(496): unsure at all Xaa locations
  Clone ID: TF_GM310N10.C12.o2.np.pep
MEEERRKIMKEMKREKHASYSSHNSCKSLSEELRDYYEGRHRSHLNWEKKVEQLFACHHISEERKVPLATLSFQGYALYWWTSLVRKQRIHGDPPVEYWNDLKSALRKRHIPSYYKSELMDKLQRLRQGSMSVEEYRQQMELLLLRSRLREEERTSIARFLSGLNMXVRDKVELLPYRDLDELVQLCIRVEQQLKRKPSSKSYGFHSYPRKDXAQQILGAASSKPKEDKGKTIEKSTPTTSSQERTSNIKCFKCLGKGHIASQCPTKKTMIMRGQDIYSSQEEKESSEEVYPHEEGDLLMVKRLLGGQSCDLSQSQRDNIFHTRCKILDKTCSHIVESGSCCNCCSTRLVSKLNLRIISHPKPYKLQWLNEQGEMIVNQQVKVPFSIGTYKDEVNCDIVPMEAGHILLGRLWKFDRKIIYDDLTNEITSPILALNXVASSNTFIGGQRSTNYEXKRDEEEKLEKQIKELLDEGLVRKSLNPCALLVCFIPLLSLTF

SEQ ID NO: 33403 - protein, 138 aa, Glycine max
  unsure (1)..(138): unsure at all Xaa locations
  Clone ID: TF_LIB3242-716-P1-K1-G2.pep
KRNCPELKKDKVSTSEFGGVAVVSEKSHGENVLYVSSNVNDDDWILDSACTFHMTPNRDWFATFQNVDGGKVLMGNDGACSIAGKGTVKIKMNDGIVRTLTHVRXMFPALKKNLISISTLDSNRCTYQAKGGALRVSK

SEQ ID NO: 33404 - protein, 482 aa, Glycine max
  unsure (1)..(482): unsure at all Xaa locations
  Clone ID: TF_GmC88487_1.pep
MGVPAFYRWLAEKYPMVIVDAIEEEAVVIDGVQIPVDTSNKNPNNIEYDNLYLDMNGIIHPCFHPEDRPSPTSFDEVFECMFDYIDRLFVMVRPXELLYMAIDGVAPRAKMNQQRSRRFRAAKDAADAAAEEARLREEFEKEGRKLPSKGESQTFDSNVITPGTEFMAVLSIALQYYVHLRLNNDPGWQNIKVILSDANVPGEGEHKIMSYIRLQRNLKGYDPNTRHCLYGLDADLIMLALATHEIHFSILREIVFTPGQDKCFLCGQMGHMAANCEGKAKRKAGEFDEKGEAIVTKKPFQFLNIWTLREYLEYEMRISNPPSEIDFDCIVDDFIFMCFFVGNDFLPHMPTLEIREGAINLLIAVYKKEFREFGGYLTNGSTINLSRVEHFIQAVGSYEDKIFQKRARLHQRQTERIKREKAQARRGDDAEPQFQPESLVAVSRFHGSRLASAPTPHHFNLLGIIILKRLHQLEKTIKNHLR

SEQ ID NO: 33405 - protein, 77 aa, Glycine max
  Clone ID: TF_GmC419_67.pep
PKYKTQKKKKSILILTKKKWIQPLIHGPKIYPKTHENPRAFSCIFGPIFLESSIQCPWGVGLHHLGGLPFLITLYLH

SEQ ID NO: 33406 - protein, 148 aa, Glycine max
  unsure (1)..(148): unsure at all Xaa locations
  Clone ID: TF_LIB3242-180-Q1-J1-B10.pep
MTNIAAKLKTLGMVVNENFHVECMLKSLLSEXGSFQMSYNTIKDKWNVHELHSMLVQEEMRLKNQGSHLVHYVSHQGNQGARKKFVKKHDKGKGPLKINNNSKQIQKKTSKRNNCHFCGKSGHFQKDCPKRKSWFEKKGIPNNPNHKP

SEQ ID NO: 33407 - protein, 168 aa, Glycine max
  Clone ID: TF_GmC115882_1.pep
NFQQICLKCGDPGHKIRNCPKEHTSQRKYNRLDVWQNNRIDKKHKSEDVNKFESDSLAKLQSNLEPLSLRHQRDGRRLSGSRHHHAPWRNESFPGARETDRHKKKEYVGKKRSRNDIELPKQSNAKISKRSVSSSLLSDYSASHFLSNSQSSKTLRRTSSHSRVDPQA

SEQ ID NO: 33408 - protein, 202 aa, Glycine max
  Clone ID: TF_GM433K20.C15.o1.fg.pep
MTSVKYEVGKFTGQNDFGLWRSKIRALLVHQGLEEALQGEITLDAKLDERDKKILMDKAHNAIILSLKDKVLRQVSKEKTTTEIWLKLEGLYMTKSLKDNHFEKKKSKPQSGNSENVPNIRCYHCKKEGHTRRFCPVRQNGCNSHTSNERGNATIVQDGYESTEALVVGSGKSDGEWIMDSRCFFHMTPNKPWFEKFTQLHG

SEQ ID NO: 33409 - protein, 447 aa, Glycine max
  unsure (1)..(447): unsure at all Xaa locations
  Clone ID: TF_GmC419_136.pep
QQLKIKPSSKSYGSHSYPRKDQAHGILGAAPSKPKEDKGKTIDKYTPKTSSQERTSNIECFKCXGXGHIASQCPIKKTMIMRGQDIYSSQEETTSCSSSSGSEDEVRGQESSEEVYPHEEGDILMVRRLLGGQSCDLSQSQRENIFHTRCKILDKTCSLIVERGSCCNCCSTRLVSKLNLTIIPHPKPYKLQWLNEQGKRIVNQQVKVPFSIGTYKDEVNYDIVPMEAGHILLGRPWQFDRKIIYNGLTNEITLTHLGTKFVLHPQTPSQVAKDQLTMKDKRDEEEKFEKQKKKKDSKALSSKARGKEKEGKDSSKKIVKKENHFATKGDIKRALLLKQSSYLLLSRETSLSNTTIPTLETLPPKVQELLHEFGDIFPKGISPGLPPLRGIEHQIDLVPGASLPNRPTYRTNPQETKEIESQVKELLEKGWVQESLSPCAVLAVVGA

SEQ ID NO: 33410 - protein, 119 aa, Glycine max
  Clone ID: TF_GmC122596_1.pep
KGKLLSLVDQRPKRNFVFKETSSKAFVVKYASEKESNDDDSNKEDNELSLITRKIKKIGKIRTPLGSIDHTKDPCTRKRKVQSSAISARNEGTSSQNVLTLKSQWIRRRNSSIPKRKAS

SEQ ID NO: 33411 - protein, 184 aa, Glycine max
  Clone ID: TF_GmC109188_1.pep
NKVVTKKIFPGRRYWHKPSISKEIETPNQKLKSKVTCYNCGKQGHISKYYRLKRKLRNLNLEPAIEEQINNLLIESSEEEETKTSSSMISDENLNLIQQDDQLSSTEDERKINTLTREQDLMFEAINSIPDPQEKKNFLEKLKKTLEVKPKQKDFITNNKFDVSNILRRLENTSAKPTTIQDLP

SEQ ID NO: 33412 - protein, 471 aa, Glycine max
  Clone ID: TF_GmC147665_1.pep
MDITLNQAPDQVQQDQATPISLQPASLMDQTILVDPATPIDLELTMKKIKKKQRKKTTSTELPEISIQTSTCLIEASPIDPAIPMDPCLAISTGPEQEMSKKKKKRKSKLESEAAELNEHYKLPEAAPPEAPVQKSIYHTDAPSIDPVGPSPPVDTETPIDQGQQMTKKKRKKKKRIVIIIEGTETNEHGVKPPETLVQKFAYPTVTTSIDPTIPVPAPPIDQGQKMRKKMRKRSALISKGAEPDEHDDKPPGTPVQRSIHPIAEPSIDPTIPASQTPPVDPATPVDPEPMTKKKRKKKRNSAKNEGLESEKHNADRIAETPVQKTEGSTTENSMGRCNVEPAGKTLVQITDTLRVTKSPFKHHGESSLRCRACRQPGHRFQQCQRLKCLSMDEEVCFFCGEIGHSLGKCDVSQAGGGRFAKCLLCYGHGHFSYNCPQNGHGIDPKVLAVNGAINRTAVEARRELLPRFNM

SEQ ID NO: 33413 - protein, 69 aa, Glycine max
  Clone ID: TF_jC-gmX3043001A11sg10F7a1.pep
FYLDLFETFVVPSFRWNFISISSLDKFEFSCSFGNNKVSLYQNSNMVGYGSFIDNLYMLDDISSYNEIL

SEQ ID NO: 33414 - protein, 192 aa, Glycine max
  unsure (1)..(192): unsure at all Xaa locations
  Clone ID: TF_LIB4203-002-R1-K1-B10.pep
GKEWEIPKYQQVLQPIVPLEGQEMQVKAKRPKPHCVNCGSEEHQMKECPMPRNAARITEKRKEYMDACGEASGQSFQQRYHAEEVEERFGRFKPXVISEELQDALGVTDKSVAPLIYRMRQVSYPPGWVKGAELENGGLGLXGGDGDAGGETGAGGNAGWGWGLRWGGGGGGCGGGGWGGLGGGVGAWRGGW

SEQ ID NO: 33415 - protein, 198 aa, Glycine max
  Clone ID: TF_GmC147156_1.pep
EKTPPASVIFCENKADVDDIHEYLLLKGVEAVAIHGGKDQEEREYAIAAFKAGKKDVLVATDVASKGLDFPDIQHVINYDMPAEIENYVHRIGRTGRCGKTGIATTFINKNQSETTLLDLKHLLQEAKQRIPPVLAELNDPMEDNEEITDISGVKGCAYCGGLGHRIRDCPKLEHQKSMAIANNRKDYFGSGGYRGEI

SEQ ID NO: 33416 - protein, 224 aa, Glycine max
  unsure (1)..(224): unsure at all Xaa locations
  Clone ID: TF_GmC80348_2.pep
MYMFKPLSSSPGLRNLEPMASMFARRFSAIKHIIPTNATDTTTQVNMLCLFCGTKGHQLSDCSAIAENKLEDLQKNIDSYGGLEEHSCLCIKCFQPNHWAISCPTSISTRKHELKANALVNDXNPTLSPSKLAERQISQVPKEIFEAVKKLQLSRTDILKDXQSQRQCSEQNTRKSLSVKVGSIKCMVESQYISNHDFLEEEIMEWWSNTSQAGAEISSEEYII

SEQ ID NO: 33417 - protein, 148 aa, Glycine max
  unsure (1)..(148): unsure at all Xaa locations
  Clone ID: TF_GmC261618_1.pep
TKIDKSILEQQEEKMHSLILLSLFDEVLYKVSKEKIAFVLWLKLXKLFMTKSICNKLLLKQHLFGLYXKEGKPLEDHLDELNSVLFXLCDIDVKLEDEDLAMILLAXSPNSYENFVNSHSVGKDCITLEEVKFSLYSRELHHIAFGKW

SEQ ID NO: 33418 - protein, 249 aa, Glycine max
  unsure (1)..(249): unsure at all Xaa locations
  Clone ID: TF_GmC9855_2.pep
MCVTDINFPILFTERKKGPYKTKRSPSRRGRSLCFFFVLNAPHEFLQRARLLGFFFLSSHCIASGSSEKMSRVYVGNLDSRVTERDLEDEFRVFGVIRSVWVARRPPGYAFIDFDDRRDAQDAIRELDGKNGWRVELSHNSRGGGGGRGWXALGGSDLKCYECGEPGHFARXECRMRGGSIRSRSRSPPRFRRSPSYGRRSYSPRGRSPRHRSLSPRGRSYSRSPPYRGREEVPYANGNGLRERRRSRS

SEQ ID NO: 33419 - protein, 48 aa, Glycine max
  Clone ID: TF_GmC127329_1.pep
KKNNNRPQHRGKPYSTKSKQFGNHPNNQRTIAMEFAGGNGSKPTTFLT

SEQ ID NO: 33420 - protein, 202 aa, Glycine max
  unsure (1)..(202): unsure at all Xaa locations
  Clone ID: TF_GmC174_6.pep
MPRYDDKYGNTRLYVGHLSSRTRSRDLERAFSRYGRVRGVDMKNDFAFVDFSDPRDADDARYNLDGREVEGRHVTVEFAKGGPRGSWESSGQGQGPPTGPGRCFDCGXDGHWARDCKTGDGKNKCFLSGERGHIEKNCKNSPKKLRHGXKSFRSHSAHHGRRRDRSYSRDRSYSRSISPVGRERSPVSEDRSESSTLLDKKA

SEQ ID NO: 33421 - protein, 240 aa, Glycine max
  Clone ID: TF_GmC25809_2.pep
RVASATYIHIFAKPPIPLSVSTVALSRDNLCKNCKRPGHYARECPNVAICHNCGLPGHIASECTTKSLCWNCKEPGHMASSCPNEGICHTCGKAGHRARECSAPPMPPGDLRLCNNCYKQGHIAAECTNEKACNNCRKTGHLARDCPNDPICNLCNVSGHVARQCPKANVLGDRSGGGGGARGGGGGGYRDVVCRNCQQLGHMSRDCMGPLMICHNCGGRGHLAYECPSGRFMDRYPRRY

SEQ ID NO: 33422 - protein, 186 aa, Glycine max
  Clone ID: TF_GmC10165_1.pep
MYQQQGSDPTKQSPATGFPVSYSNSTTYSTNEASYAPVPPPQPKPLVDWSTGLCDCFSECGNCCMTCWCPCVTFGRVAEIVDKGSTSCGASGALYTLICCVIGCGCLYSCFYRPKMRRQYGLKGNGCSDCLIHCFCEPCALCQEYRELQHRGFDMIIGWHGNVEQRSRGVAMTATTAPSVENGMSR

SEQ ID NO: 33423 - protein, 94 aa, Glycine max
  Clone ID: TF_LIB4390-027-Q1-N1-B2.pep
KMLPKTVTESILICISRVGVISKGTSVFRGVSMKFSICFGKWYWIKNSVNSMIMLSYFWGEFGGLYGPVFYLTMLLVFNIFLNLPGLGTDRKNE

SEQ ID NO: 33424 - protein, 1112 aa, Glycine max
  Clone ID: TF_GmC2654_4.pep
MTNDSSKMTSKFAKLDKFEGQDFRRWQKKIHFQCCQEKVVYVLSTPMPVYMEDETLDQTRKRSKWENDDYICRGHILNGMSDSLFDIYQNIESAKELWDSLESKYMAEDASSNKFLVSNFFNYKMSDSRPVMEQYNELLRILGQFTQHDLKMDESIAVSSIIDKLPSSWKDFKHTLKHKKEELTLVQLGSHFMIEESLRAQEIDKVNDKTVAGSSSVNMVEESGTVKQNYNAKGNKRKFQGNKNKGPNKQTKLSCWKCGKPGHLKRDCRVFKGKNKAGPSGSNDPEKRQGQIVVNNFNSNTNSNYVSLISNAFYVQDDDVAWWFDSGATSHVCKDRRWFKEFRPIDDGSIVKMGNVATEPILGLGCVNLVFTSGKSLYLDNVLFVPGIRKNLLSGMVLNNCGFKQVLESDKYILSRHGSFVGFGYRCNGMFKLNIDVPFVHESVCMASCSSITNMTKSEIWHARLGHVHYKRLKDMSKTSMIPPFDMNIEKCKTCMLTKITRKPFKDVKSETKVLDLIHSDLCDLHATPSLGHKKYLVTFIDDASRYCYAYLLNTKDEALDKFKIYKKEVELHQNGLIKTLRTDRGGEYYDPVYFQSTGIIHQTTAPYTPQQNGVAERKNRTLKEMVNSMLSYSGLSEGFWGEAMLTACYLLNRIPNRRNKVTPYELWHKKTPNLSYLKIWGCRAVVRLTEPKRKTIGERGIDCIFIGYAEHSKAYRFYVLESNDSVAVNSVIESRDAIFDEQRFTSIPRPKDMNSMSKVSVNIEDIPLTSTETRKSTRVRKAKSFGDDFQLYLVEGSRNDIEFQYQYCLNVEEDPKTFSEAMASRDAVFWKEAIQSEMDSIMQNNTWKLVDLPPGCKPLGCKMIFRRKMKVDGTVDKYKARLVIQGFRQKEGIDFFDTYAPVARISTIRLLLALAAIHNLLIHQMDVKTAFLNGELDEEIYMKQPEGFVMPGNENKVCKLMKSLYGLKQAPNQWHQKFDEVVLSSDYVLNQADKCLYSKFDTHCKGVIICLCVDDHLIFGIDQHQVDETKTFFSSTFDMQEMGQAAVILGIKIKREHILIFISQSHYIEKILEKFNFIDCSRVRTPIDHKQKLAPMKSVEGSQLKNSGATE

SEQ ID NO: 33425 - protein, 150 aa, Glycine max
  unsure (1)..(150): unsure at all Xaa locations
  Clone ID: TF_LIB4391-053-R1-K1-G3.pep
MSMHFLQWQHLGFFVSRDNLCKNCKRPGHYARECPNVAICHNCGLPGHIASECTTKSLCWNCKEPGHMASSCPNEGICXCGKAGHRARECSAPPMPPGDLRLCNNCYKQGHIAAECTNEKACNNCRKTGHLARDCPNDPICNLCNVSGHV

SEQ ID NO: 33426 - protein, 222 aa, Glycine max
  unsure (1)..(222): unsure at all Xaa locations
  Clone ID: TF_GmC111765_1.pep
NFKNQNRNVNNTSNRNKNPTRVQHARQHPPAKNNPGEPFLCYNCGKPGHMARKCRNPSMTGAPQSNMTQEPYIAVITEINMIGGSDGWWVDTGASRHVCYDRAMFKTYTNVENKKVLLGDSHTTTVAGTRDVELKFTSGKTLILKDVMHTPEMRKNLVSGFLLNKAGFTXTIGVDLFTLTKNGIFVRKGYATDGMFKLNLDINKVSPSAFLLCDFNIWHYRV

SEQ ID NO: 33427 - protein, 279 aa, Glycine max
  Clone ID: TF_GmC17809_1.pep
MAGKEENRIFVGGLSWEVTERQLEHAFARYGKILECQIMMERDTGRPRGFGFITFADRRGMEDAIKEMHGREIGDRIISVNKAQPKMGGDDADQGYRGGYSSGGRGSYGAGDRVGQDDCFKCGRPGHWARDCPLAGGGRGRGGSSFPSRPRFGAAGGHGDRLGGERDRYVDDRYEGGRYGDRDRFDNRDYKYGSRDRYASDRYPTSGDRFASDRYGGGSDYPQNGYGKERGYDRYGGPRGGADRYGSGMGGRDEGRSYRGRPGPYDRPSRGSRSSLDRY

SEQ ID NO: 33428 - protein, 58 aa, Glycine max
  Clone ID: TF_GmC986_9.pep
TVAGGTLVVEAAASADEAATAVESLGILPEIAHQVLVEFTVRVVYVLRIVLSFYFNMS

SEQ ID NO: 33429 - protein, 493 aa, Glycine max
  Clone ID: TF_GmC10165_6.pep
EDVEMILENLPAQRQSMLFSATMPSWVKKLARKYLNNPLTIDLVGDEEEKLAEGIKLYAIAATATSKRTILSDLVTVYAKGGKTIVFTQTKRDADEVSLSLTNSIMSEALHGDISQHQRERTLNGFRQGKFTVLVATDVAARGLDIPNVDLIIHYELPNDPETFVHRSGRTGRAGKQGNAILLYTSSQRRTVRSLERDVGCKFEFVSAPAMEEVLESSAEQVVATLGGVHPESVQFFTPTAQRLIEEQGTSALAAALAQLSGFSRPPSSRSLITHEQGWITLQLTRDSDSRRYFSARSITGFLSDVYPAAADEVGKIHLIADEKVQGAVFDLPEEIAKELLNRDIPPGNTVSKITKLPSLQDDGPPSDFYGRFSDRDRSSRRGSTSRGGFSSRGGSASRDRRGFKSSRGWDGEDSDDDDFGDRSSWRGGRNFKTGNSWSRAAGRSSGDDWLIGGSRRSSRPSSSDRFGGACFNCGESGHRASDCPNPSNRRSF

SEQ ID NO: 33430 - protein, 176 aa, Glycine max
  Clone ID: TF_GmC173_13.pep
MSDVEEYRCFIGGLAWSTSDRKLKDTFEKFGKLIEAKVVVDKFSGRSRGFGFVTFDDKKAMDEAIDAMNGMDLDGRTITVDRAQPQQGSTRGDGDRYRDRGRDRDRDHGGGGGRGSNGGECFKCGKPGHFARECPSEGSRGGKYGGRESTYGGSSGGGYGPDRADRSSGGRSRGWW

SEQ ID NO: 33431 - protein, 267 aa, Glycine max
  unsure (1)..(267): unsure at all Xaa locations
  Clone ID: TF_GmC45275_1.pep
MVSQRQRLARKRYKAEHPELFPKPEPTPPKDPEKKKKKKKNSAFKRKRPEPKPGSRKRHPLRVPGMKPGESCFICKAMDHIAKLCPEKAEWEKNKICLRCRRRGHRAKNCPXEVLDGAKDAMYCYNCGENGHSLTQCPHPLQEGGTKFAECFVCNQRGHLSKNCPQNTHGIYPKGGCCKICGGVTHLAKDCPDKGKSGSVAANRPADGWMRIEERPMGQVTKFVSGDDIEDDFMTDDIHSADKKKPAKSTEDHVKPKKKEGPKVVNF

SEQ ID NO: 33432 - protein, 150 aa, Glycine max
  Clone ID: TF_GmC85470_1.pep
QNPCNQPQLMTVTYSQFNRRNHNITHSHSFPFPNIRTFPHKMPFLPTVKTPSSSSTATAAASPIPTITINTTTTTLSMVTIPRQVTYSSTIITLRTCCSSTEPSAEASSFSPPYSDAEAPCTARSNGGSDLHGHGAAAVPVIEEKLNGLT

SEQ ID NO: 33433 - protein, 207 aa, Glycine max
  Clone ID: TF_GmC104291_1.pep
GTATGCYKCGKPGHWSRDCPFSAPNPNPNSNTATTPNPNTPNPSSSSFKSRSATEKPKKLPRTKPKLTPELLLSDEGLGYVLRYFPREFKYRGGGHEVRDLGNLLRLYTEWHSRLLPYYSFNQFVHKVEKVAATRRVKTCLRELRERVASGGDPTKLREPPVVHDIPSDEHGYVVSAEDGGATHQETDVFAESENVNDIQEDMLNDI

SEQ ID NO: 33434 - protein, 174 aa, Glycine max
  Clone ID: TF_GmC9855_7.pep
MSRVYVGNLDSRVTERDLEDEFRVFGVIRSVWVARRPPGYAFIDFDDRRDAQDAIRELDGKNGWRVELSHNSRGGGGGRGGRSGGSDLKCYECGEPGHFARECRMRGGSGRRRSRSPPRFRRSPSYGRSPRGRSPRHRSLSPRGRSYSRSPPYRGREEVPYANGKGRKNIRHDE

SEQ ID NO: 33435 - protein, 143 aa, Glycine max
  unsure (1)..(143): unsure at all Xaa locations
  Clone ID: TF_LIB4167-066-Q1-N1-F3.pep
LLGLLLVLCHFFIYWAFSFLFYGAGKNGWRVELSHNSXGGGGGRGGRSGGSDLKCYECGEPGHFARECRMRGGSGRRRSRSPPRFRRSPSYGRRSYSPRGRSPRHRSLSPRGRSYSRSPPYRGREEVPYANGNGLRERRRSRS

SEQ ID NO: 33436 - protein, 170 aa, Glycine max
  Clone ID: TF_LIB4204-002-Q1-K1-E1.pep
MSRVYVGNLDSRVTERDLEDEFRVFGVIRSVWVARRPPGYAFIDFDDRRDAQDAIRELDGKNGWRVELSHNSRGGGGGRGGRSGGSDLKCYECGEPGHFARECRMRGGSGRRRSRSPPRFRRSPSYGRRSYSPRGRSPRRRSLSPRGRSYSRSPTYRGREEVPYANGNGP

SEQ ID NO: 33437 - protein, 287 aa, Glycine max
  Clone ID: TF_GmC174_3.pep
MPRYDDKYGNTRLYVGHLSSRTRSRDLERAFSRYGRVRGVDMKNDFAFVDFSDPRDADDARYNLDGRDVDGSRIIVEFAKGAPRGSREYLGRGPPPGSGRCFNCGLDGHWARDCKAGDWKNKCYRCGERGHIERNCKNSPKKLSTRRGRSYSRSPVRSHSPHRGRSRDRSYSRDRSYSRSRSPVRREESPVREDRSQSPQHKNSPQPSKTRKHSPSPDRSPQKRGDTSPDNDRLSRSPARDPEDRGYDSPKVNGRSGSPSCSPRDDDRSPIDDDNNHRHSPRGSESP

SEQ ID NO: 33438 - protein, 192 aa, Glycine max
  Clone ID: TF_GmC92326_1.pep
GSSSSRDVTGVDGGPLQPRAAAGNNNRAAGSGFGFGARRNGGGGAACYQCGEFGHLARDCNRSSNSGGGGGGSGGGCFNCGGFGHLARDCVRGGGGSVGIGGGGGGGSCFRCGGFGHMARDCATGKGNIGGGGSGGGCFRCGEVGHLARDCGMEGGRYGGGGNSGGGGGGKSTCFNCGKPGHFARECVEASG

SEQ ID NO: 33439 - protein, 237 aa, Glycine max
  unsure (1)..(237): unsure at all Xaa locations
  Clone ID: TF_GmC25809_1.pep
MSSDSRSRSRSRSPMDRKIRSDRFSYRDAPYRRDSRRGFSRDNLCKNCKRPGHYARECPNVAICHNCGLPGHIASECTTKSLCWNCKEPGHMAXSCPNGGMWHTCGIAGHXLRRVLSPSKSSKGVEVCNNCRKTGHLARDCPNDPICNLCNVSGHVARQCPKANVLGDRSGXGGGGGARGGGGGGYRDVVCRNCQQLGHMSRDCMGPLMICHNCGGRGHLAYECPSGRFMDRYPRRY

SEQ ID NO: 33440 - protein, 125 aa, Glycine max
  Clone ID: TF_GmC92326_2.pep
ALEVVAEADLALGVADLDTWRGIAPPGRATLAVEEAVEVVFGVGRLVIWLGIAAWKEGDLVVVAEAAAAVEKALALIVGSQGILRGNVLKLQVEVKKGLLHFAKGEKRWNSTYSLFWHILTVINL

SEQ ID NO: 33441 - protein, 258 aa, Glycine max
  unsure (1)..(258): unsure at all Xaa locations
  Clone ID: TF_GmC25809_3.pep
MSSDSRSRSRSRSRSPMDRKIRSDRFSYRDAPYRRDSRRGFSRDNLCKNCKRPGHYARECPNVAICHNCGLPGHIASECTTKSLCWNCKEPGHMASSCPNEGICHTCGKAGHRARECSAPPMPPGDLRLCNNCYKQGHIAAECTNEKACNNCRKTGHLARDCPNDPICNLCNVSGHVARQCPKANVLGDRNGGGGXAAARGGGGGGYRDVVCRNCQQLGHMSRDCMGPLMICHNCGGRGHLAYECPSGRFMDRYPRRY

SEQ ID NO: 33442 - protein, 226 aa, Glycine max
  Clone ID: TF_GmC55382_1.pep
TIVKAEKVNFASKSRVNLELIFNELRAEKSKGITIPNSVTNNTRLGSVETGQVTPPAYYKSNANTSRDFGMPANQVGQQHGNQYSNISSAGAAPGSYTSCTNCGVSGHSSALCPNIRNVPGHSAGGGFANRASAGLGGGGGASVECYKCHQSGHYARDCPGFSAAPPSSYGSNSGGGGSGECFKCHQTGHWARDCPGLSAAPSSYGSANAMQGRYGVAQKQQFGGY

SEQ ID NO: 33443 - protein, 199 aa, Glycine max
  unsure (1)..(199): unsure at all Xaa locations
  Clone ID: TF_GmC174_1.pep
MFSRARRNQRCPRYDDKYGNTRLYVGXRLSSRTRSRDLERVFSRYGRVRGVDMKNDFAFVEFSDPXRDADDARYNLDGRDVEGSRIIVEFAKGGPRGSRDREYMGRGPPPGSGRCFNCGIDGHWARDCKAGDWKNKCYRCGERGHIEKNCKNRPKKLSQRGTSLSRSPVRSRSPTXREEARDRSYSRDHSDSRARSPVR

SEQ ID NO: 33444 - protein, 171 aa, Glycine max
  Clone ID: TF_LIB4367-017-R1-N1-F11.pep
HFEQEFSDPRDADDARYSLDGRDVEGSRIIVEFAKGGPRGSRENLGRGLPPGSGRCFNCGIDGHWARDCKAGDWKNKCYRCGERGHIEKNCKNSPKKSSRHGRSLSRSPVRSHSPRRGRSRDRSYSRDRNYSRSRSPVRRERSPVSEDRSQSPEPSKIRKHSTSPDQSSPT

SEQ ID NO: 33445 - protein, 73 aa, Glycine max
  Clone ID: TF_LIB3242-590-P1-J1-B7.pep
YNSGESGHLSRDCRGGGGGDRYGGGGGGGTYGSRRGGRYSGGRSSRCRRRNCYRRGETGHFARDCPSSARRIY

SEQ ID NO: 33446 - protein, 552 aa, Glycine max
  Clone ID: TF_GmC2715_1.pep
MGRKEKQNAKAIDEEHDVVNFNGASTPSLVFSSDDDEANQDLSLKIVEKAMRMRAAKHAPNDDVSSPFSQKSELAVPLNDVVSDLPSAIADSEVTEKKKTAKLKREAAGDQSVVIAEEQEMEETSNATENHEFVEGSPVLIGHNMVLRKLLRGPRYFDPPDSSWGACFNCGEDGHAAVNCSAAKRKKPCYVCGGLGHNARQCTKAQDCFICKKGGHRAKDCLEKHTSRSKSVAICLKCGNSGHDMFSCRNDYSPDDLKEIQCYVCKRVGHLCCVNTDDATPGEISCYKCGQLGEADRRGSRLRDEITSGATPSSCFKCGEEGHFARGCTSSIKSGKRNWESSHTKDKRSQKENDYMGNRSASNDMVGARRKKRSPTEERGFSTPKKSKSRGGWTAEYPTEERGFTTPKKSKSRGGWTTEHPTEERGFTTPKKSKNRGGWTSEHPLEQKDYTTPKKSKSRGGWMSEHPEEFFPPMSSRSNGYRSLGTPSSRNNKIHSFGGGSHTPSYKSSKVWNDHAGTSMSQGSARSNHHRFSASRFGNSSSDGHGRNYNWW

SEQ ID NO: 33447 - protein, 59 aa, Glycine max
  Clone ID: TF_jC-gmXLIB3563P014ag08a2.pep
MNKGELSKGPGRILREADQASLCWDRDAKAHRANFVGARHARTLLRRTCRSPTPRKAAG

SEQ ID NO: 33448 - protein, 61 aa, Glycine max
  Clone ID: TF_LIB3242-138-Q1-J1-C10.pep
MCKGAEGEKQHGFCSSYLHKECATRSATCCELCGLQASLYCQADDAYLCRKCDKRVHEANF

SEQ ID NO: 33449 - protein, 68 aa, Glycine max
  Clone ID: TF_LIB3056-003-Q1-N1-G10.pep
TDSGAPVACQDKPCDQYKLASAVLFLRPNSALLCISCDSDIHCSNKLMYRHDPVSMCETCEPAPIDVT

SEQ ID NO: 33450 - protein, 73 aa, Glycine max
  Clone ID: TF_jC-gmle01810044g07a1.pep
VVRDISACDRVEQEPSSGSVVVVQVSIVCELVDVDPGASCIHINLITIVPLQSVCLRGCVVPGGAYPVSVNLA

SEQ ID NO: 33451 - protein, 109 aa, Glycine max
  unsure (1)..(109): unsure at all Xaa locations
  Clone ID: TF_7591390.pep
KIQYSVYKATKAKVLYCTNEAALYXECDKKVHTANKLTSKHQKIPLSLSASHIPKYNIXPKIINYFFYLENQALLYRNYNISIHTXNTYISNHQEWLLTSMRVNLKATE

SEQ ID NO: 33452 - protein, 91 aa, Glycine max
  Clone ID: TF_GmC24129_6.pep
DNSDHKTNISMQRQSGSTPWISGLHKNHIYNPSLDSLFSCTSVSINESPPRNSLYKPRYAAKNREVPPSYLKMQKPNFFFSVFPVLSCALC

SEQ ID NO: 33453 - protein, 145 aa, Glycine max
  unsure (1)..(145): unsure at all Xaa locations
  Clone ID: TF_jC-gmXLIB3563P061ad12d2.pep
MKIYCNECXLVEPQFLCXANEAALCWECDEKDHADNKLAFKHQRVAVSISWYHLPEWDIGQEPFSYFFCLQERALLCIKMXDVALHTGKAFVSRHQKVLFTGVRVCLEAIEPGASLTSLTTNSGERVSDAKNSSVCRKVFTVPQP

SEQ ID NO: 33454 - protein, 62 aa, Glycine max
  Clone ID: TF_jC-gmst02400049f05a1.pep
MAFKLCDTCRWDTDTLFWRPDAVFLWGACDFKVHAANKLASRHPHVLLCEVCKQAPTHVIWK

SEQ ID NO: 33455 - protein, 243 aa, Glycine max
  Clone ID: TF_GmC998_1.pep
MKPKTCELCHQLASLYCPSDSAFLCFHCDAAVHAANFLVARHLRRLLCSKCNRFAAIHISGAISRHLSSTCTSCSLEIPSADSDSLPSSSTCVSSSESCSTNQIKAEKKRRRRRRSFSSSSVTDDASPAAKKRRRNGGSVAEVFEKWSREIGLGLGVNGNRVASNALSVCLGKWRSLPFRVAAATSFWLGLRFCGDRGLATCQNLARLEAISGVPAKLILGAHANLARVFTHRRELQEGWGES

SEQ ID NO: 33456 - protein, 125 aa, Glycine max
  Clone ID: TF_GmC24129_2.pep
LSLETTRPLNTTQYNSLISRAQEEERENQKSKREKEKSGVSAHSCPAVFLGCAPPSIPLLRDPPGLAPWPVFSLLPASRCIAGMRFLVSLSPRLLASMVWGRIRLLHLQIRRGNILYFLRAYCGL

SEQ ID NO: 33457 - protein, 215 aa, Glycine max
  unsure (1)..(215): unsure at all Xaa locations
  Clone ID: TF_GmC12_1.pep
MRTLCDVCESAAAIVFCAADEAALCSACDHKIHMCNKLASRHVRVGLADPTDVPRCDICENAPGTXAFFYCEIDGSSLCLQCDMIVHVGGKRTHGRYLLLRQRAQFPCDKPAQMEELGLQPMDQNESRRDESQSLKLKIRDSQQNHSVSPVPRQENNIDGHGKMDKKLIDLNTRPLRLNGAAPNNQERGMDILRGNNHKSASVPPVESFKQESEK

SEQ ID NO: 33458 - protein, 419 aa, Glycine max
  Clone ID: TF_GmC117_1.pep
MSSATKNAANAVGAKTARACDSCITKRARWYCAADDAFLCQACDSSVHSANPLARRHERVRLKTASYKSTDEQQQQQQQQPPTWHTKKPRTPRHRKHSRNNNPFHLVPEEGSEEANSHDENEEQLLYRVPIFDPFVAELCGTNSSPSPVTSTDQGVVAAAEVEYKGIQSNGFCSNSNEMENLHGMLPSDAELAEFAADVESLLGRGLENKCVGMEELGLVDAKEEECSVGSGKVKMEDQEESPLVEMEMDMVVGRDDQSFELSFDYETCEEVKVCDLGLGNELGAKKENDDEVKKNKISLQLDYEAVIIAWASQKSPWTTADKPNLDPDECWKQCMGSCETAYHHPCGEMGGFGIHPVIIDGGREARVSRYREKRRTRLFSKKIRYEVRKLNAEKRPRMKGRFVKRASFAPPTFPLLNK

SEQ ID NO: 33459 - protein, 423 aa, Glycine max
  Clone ID: TF_GmC5877_1.pep
MDPLCEFCRVVRAVVYCKSDSARLCLHCDGCVHSANSLSRRHSRSLLCDKCNSQPAMIRCMNHKLSLCQGCDWNPNDCSALGHRRLALNCYTGCPSLAEFSRLWSFVFDANSSLGGWESVGTLPKSESCTSQCLEQTDHNGGYFGLVSDKLDEIESCVRYQPRMDQSQIIPSNPNYTPYCKDEAFFFPQDSNQPKLQECPNLGIHDGNELCEGFNVDNVQLNFEIADEIFYCSQVATRYHLEDGGMDCLLMDKNIAVTESSSLIESAMEASSSIQQDCVAFQSSRAGGSASVMQVINSNTNCALMNPSCTKNISLGFPQGLVHSNMPLQFPNIVGENNSTEYQDCGLSRVGESPWESNLEGTCPQARDKAKMRYNEKKKTRTFGKQIRYASRKARADTRKRVKGRFVKAGEAYDYDPLGTRDI

SEQ ID NO: 33460 - protein, 427 aa, Glycine max
  unsure (1)..(427): unsure at all Xaa locations
  Clone ID: TF_GmC906_1.pep
MTNEMKEASALGARTARACESCLKVRARWXCAADDAFLHHGCDNMVNSANQLVGGQKRLKLQTPSSMCNNTLTPKLVXPNCMRTKSKISLQYQSRSPSFVTKGESVCLDLTXRSQKRAFNYNISHRPLVPELGKEEPMLNDETEEQLQCRVPLFDAGFSRIYNEVKDXVVAFCEEALDLENFSSEFLPSDTDLAEFTADVKSFLGNGADEDSPDDDEHVKESELLILDCKEEEGDEEMDECFDVVLIEAKEGMVKVKDEEKLDADDDTACHLDSILDMNGEAFNWNIVESESPAQAQEDEVSKVGTKKDIFLRLNYEEVITAWASQGSPWTNGTPPKFFNSDDCWLDFLGSNGGNVQCCYGAVGSLRVHADGGREARVSRYREKRRTRLFAKKIRYEVRKLNAEKRPRMKGRFVKRTPFVGATALPA

SEQ ID NO: 33461 - protein, 85 aa, Glycine max
  Clone ID: TF_uC-gmflminsoy034d11b1.pep
MRTLCDACESAGGIVFCAADEAALCRACDEKGHMCNKLASRHVRVGACRPSDVPRCDICENAPAFFYWETDGSSFWLQCDMIGHG

SEQ ID NO: 33462 - protein, 107 aa, Glycine max
  unsure (1)..(107): unsure at all Xaa locations
  Clone ID: TF_GmC6837_2.pep
MGYLCDFCGDQRSLVYCRSDAACLCLSCDRNVHSANALSRRHSRTLVCERCNSQPAFVRVCXMRKISLCQNCDWVGSMGPHHLSSTHKKASINCYSGCPSAAEFSSI

SEQ ID NO: 33463 - protein, 208 aa, Glycine max
  Clone ID: TF_GmC117_2.pep
MSSATKNAANAVGGKTARACDGCITKRARWYCAADDAFLCQACDSSVHLANPLARRHERVRLKTASYKSTDERRQPPTWHTKKPRTPRHGKHSRNNNPFHLVPEEGSEEANSHDENEEQLVYRVPIVDPFVAELCGTNSSPSSVTSTDQGVVAAAAAASAEVEYKGIQSNDFCSNSNEIENLHGMLSSDAELAEFAADVESFWVRGLE

SEQ ID NO: 33464 - protein, 221 aa, Glycine max
  Clone ID: TF_GmC264_1.pep
MKNCELCKLPARTFCESDQASLCWDCDAKVHGANFLVERHTRTLLCHACQSPTPWKASGAALGNTVSLCERCAGGTTEQGQESQGGNDDDIDTDIDTDDEDDYDESEDEVAADEEDGDNQVVPWSSEPPPPAPSSSSSEESVSRCNNVDEVSTTLKRRRQEDNDFQGWNSNNWGCERSEVERGGWLVRLRRRTADDVAVEQRSARAASPDGCCGDRASEDV

SEQ ID NO: 33465 - protein, 31 aa, Glycine max
  Clone ID: TF_701038605H1.pep
MKIQCNVCEAAEAKVLCCADEAALCWECDEK

SEQ ID NO: 33466 - protein, 205 aa, Glycine max
  Clone ID: TF_GmC903_1.pep
MEESSTTCVLCEKRAMMLCDSDQAKLCWECDEKVHSANFLVAKHSRVLLCRLCHSPTPWKASGMKLTPTVSFCNRCVAERNARWNRLVNNENEHQQQQQQQQQSDFVVDDGREYGSDHVFDDDDGDYSDDSGEEEEEDEDDEEENENQVVPMSSGSATSPPKVACLALKRLRNNSFLSILHMMRQRALHLRCLVLHCLVVMNHPL

SEQ ID NO: 33467 - protein, 80 aa, Glycine max
  Clone ID: TF_LIB3094-087-Q1-K1-A12.pep
FLCLGCDSKVHAANKLASRHARVWVCEVCEQAPAHVTCKADAAALCLTCDHDIHSANPLARRHERVPVTPFYDTFNSDNS

SEQ ID NO: 33468 - protein, 369 aa, Glycine max
  unsure (1)..(369): unsure at all Xaa locations
  Clone ID: TF_GmC271_1.pep
MRDMKDAGALGGKTARACDSCVSRRARWFCAADDAFLCHGCDTLVHSANQLASRHERVRLQTASSKVTTTHAWHSGFTRKARTPRHNSKHFALQQRLKDEVLFNNTSVLPLVPELGGEEQEPVVVDNDETEEQMLCRVPVFDPFDVRTDDLDSFSDMDFAEFAADVESLLEKEDDEISAYVXKGRGEEEIDGDVXVIVKDEEEIDGDVACYLESVFDDAFHWNNIESVLSDAREEKEGVVACDVGVGDEEGGTKRDIFLRLNYDEVITAWSSQGSSPWTTSNPPKFNSDYDFSLGLSGVGGEVRSLRGHLDGGREARVSRYREKRRTRLFAKKIRYEVRKLNAEKRPRMKGRFVKRTCFVGANAFPAYH

SEQ ID NO: 33469 - protein, 247 aa, Glycine max
  unsure (1)..(247): unsure at all Xaa locations
  Clone ID: TF_GmC271_2.pep
MRDMKDAGALGGKTARACDSCVSRRARWFCAADDAFLCHGCDTLVHSANQLASRHERVRLQTASSKVTTTHAWHSGFTRKARTPRHNSKHFALQQRLKDEXSLQQEPVVVDNDETEEQMLCRVPVFDPFDVRTDDLDSFSDMDFSEFAADVEGRLDKEDDEISAYVGGGEGVQGVLAKVKGEEEIDGDVACYLESVFDMISDDAFHWNNIESVVSDAPEEKGCVVPCEGGVREQGGIKGDIFLRLNY

SEQ ID NO: 33470 - protein, 229 aa, Glycine max
  Clone ID: TF_GmC226050_1.pep
NGIPGATHASGNIFSSSLSPLVHFTIEILRSASSHAYHHSPFTTMLPCDYCHSKPAILFCRPDSAKLCLLCDQHVHAANALSLKHVRFQICDSCKTDTAVLRCSTDNLVLCHHCDVETHGAAASSHHQRHRLHGLSGCPSVTEIASALCLDFRAQDPVVPTAASGGRDEVYEQVLEIARQRNDDLGAEQLKFDESPINDVVVVDEMLMQQTPFTSLLYVPNSESEFHSR

SEQ ID NO: 33471 - protein, 295 aa, Glycine max
  Clone ID: TF_GmC24129_3.pep
MGYICDFCGDQRSMVYCRSDAACLCLSCDRNVHSANALSKRHSRTLLCERCNSQPAFVRCVEEKISLCQNCDWLGHGTSTSSSTQAREAINCYSGCPSAAELSSIWSFVLEIAAISESTCEQELGLMSINENKCVGVPPEDQNVSGSDEVTDLPALNKSLVGASLMPESSSEPCILDQPAGPTNECLPKLYCPATKCPALSEDDNLYDDFNMDEVDLDLENYEELFGMALSHSEELFENGGIDSLFGTKGMSAGDSNCQEAIAAEVLNSSYLLSVIIMAFFTNGASHVMFCILHR

SEQ ID NO: 33472 - protein, 143 aa, Glycine max
  unsure (1)..(143): unsure at all Xaa locations
  Clone ID: TF_GmC723795_1.pep
MEKVCEFCTALRPLVYCKADAAYLCLSCDSXVHLASAASGRHLRNXVCHSCGYHLAYVLCLEHKMLICRDCDQKLHNLSLPHKKRAIRSFMGCPSAKDFAALWGFESNEIENYSAQDQFGSVSCVSADLNVAQVSGKPGIQTG

SEQ ID NO: 33473 - protein, 116 aa, Glycine max
  unsure (1)..(116): unsure at all Xaa locations
  Clone ID: TF_GmC24129_4.pep
MGYICDFCGDQRSMVYCRSDAACLCLSCDRNVHSANALSKRHSRTLLCERCNSQPAFVRCVEEKISLCQNCDWLGHGTSTSSSHXKRQAINCYSGCPSAAELSSIWSFCVRNRCHK

SEQ ID NO: 33474 - protein, 364 aa, Glycine max
  unsure (1)..(364): unsure at all Xaa locations
  Clone ID: TF_GmC38808_1.pep
MSCPKHHTLTPRMLEGQATMRTWARMCDTCRSVPSTVFCRSHTAFLCATCDTRLHVSLTWHERVWVCEACERAPAAFLCKADAVCLCAYCDADIHACNPLASSHHPVPILPIHARHNNNNDDDDVADVDDEDETASWLLLNPIKSATVPNTNNHNNNNGFLYNEEVDEYLDLIDNCXSCLDNNHFASAAATTDHYAQHQHFAGVSQKSYAGDSVVPVQQHQHFQLGLEFDNSKPAFSYNGSVSQSVSVSSMDIGVVPESPMRDVSIAHTRPPKGTIDLFSGPPIQVPSHFSPMDREARVLRYREKKKMRKFEKTIRYASRKAYAETRPRIKGRFAKRTDVEAEVDQMFSTTLITEVGYGIVPSF

SEQ ID NO: 33475 - protein, 167 aa, Glycine max
  Clone ID: TF_GmC162685_1.pep
SPNSKQRTCDYCGSFTALLYCRADSAKLCFFCDRKVHFPNQLFSKHKRAQLCDACGDSPASVLCSAENSVLCQNCDCGKQKHLASEAHQRRPLEGFSGCPSVTELLTILGLSEKSLLSNEGTSQIDDDLSDLHVWSAPSINGLEDLITTTASSQKERVGACGRHKEE

SEQ ID NO: 33476 - protein, 512 aa, Glycine max
  Clone ID: TF_GmC919_1.pep
MAPFPLMCFVILLLSSTVSVTATATQTTLTVGKLDQVPHIMCKECELPPPPPKECPPPPIPLAPPPPLPPSPSPPLPPSPPPPLPPSPSATLPAPIPLTHSLPKLIQVANPSSFNSSLATTAVLPLAAFFKSDFRELAMGIERGGFKGFRSAWSVPPKPCDSCKLASAALFCRPDSAFLCIACDSNIHCSNKLASRHERVWMCEVCEQAPAAVTCKADAAALCVTCDSDIHSANPLAQRHERVPVEPFFDSAESIVKASAAATFGFIVPSDDGGASDAFAPDDSDAAAWLIPNPNFGSKLMDAPEIKSKEIFFSEMDPFLDFDYSNSFQNHNSAGNDSVVPVQKPSLAPPLINNHHHHQSETCFDVDFCRSKLSSFNYPSNSLSQSVSSSSLDVGVVPDGNTVSDMSYSFGRNSSDSSGIVVVSGNSVGQGATQLCGMDREARVLRYREKRKNRKFEKTIRYASRKAYAETRPRIKGRFAKRTEIDSDVERLYSPGPAVLMLDTPYGVVPSF

SEQ ID NO: 33477 - protein, 54 aa, Glycine max
  Clone ID: TF_LIB3138-069-P1-N1-A9.pep
ESPIIQTLCDACESAQAIVICASDKAALCLACDEKINLFELTGSHVQQAISYVC

SEQ ID NO: 33478 - protein, 118 aa, Glycine max
  Clone ID: TF_LIB3242-471-P1-J1-G3.pep
MCKGAEGEKQHGFCSSFLHKESATRSAICCELCGLQASLYCQADDAYLCKKCDKRVHEANFLALRHIRCFLCNTCQNLTRRYLIGASLEVVLPANINWTIRNLLNNRGIYRKCSRMHN

SEQ ID NO: 33479 - protein, 125 aa, Glycine max
  Clone ID: TF_GmC906_4.pep
MTNEMKEASALGARTARACESCLKVRARWYCAADDAFLCHGCDNMVHSANQLASRHERVKLQTASSKVNYSVTPKVAWHSGFTRKARTPRHNNNRHSSLKQQQQKKPLHEERGEEEVFFNNTISL

SEQ ID NO: 33480 - protein, 48 aa, Glycine max
  Clone ID: TF_LIB3028-010-Q1-B1-A12.pep
MSIHCEVCETAPGAVICCADEAALCAKCDVEVHGSNKLDRKHETPLLQ

SEQ ID NO: 33481 - protein, 114 aa, Glycine max
  Clone ID: TF_GmC36880_2.pep
GSGGCCGGAATRLCARCESVDYCSLSHQIAHWNRHKHECDRLQQQLKSVEVLNDFPFTFSRESTFQVCVKQETRCSFLSKRGLHQVEMWMHECACGASSASFDCLGFLHISFIF

SEQ ID NO: 33482 - protein, 212 aa, Glycine max
  Clone ID: TF_LIB4201-003-Q1-K2-F7.pep
MDTDATGDPVDKLKAIQNDDVEYQDEDDDFDDEEEEEDDPITLGFVDKPKNEWSLRRQYFPSKTGGVPAWLDPLNIPSGRSSVCDICGDPLQLLLQVYAPTDKETTFHRMLFVFMCPSMKCLLRDQHEQWKRHPEKPSRSVKVFRCQLPRINPFYSPECPQYNESHEPAGSGAALCDWCGTWKGDKLCSSCRQARYCSEKHQAMSWRTGHKT

SEQ ID NO: 33483 - protein, 343 aa, Glycine max
  Clone ID: TF_GmC165_1.pep
MCEKEVYGEQSICCGRCRAVVYCSSICQKQHWNDTHKSMCGLYKAMMEREEELAIMIFMFPCSADQPCKWLESLGIHQKGMWRRKCSCYSHCSFGLLPVKGGLQELWGGIDEFEYPHDSPFNNHFISSPFLLSGWPEYYNLRSLPLSSPVADILSHPLTVYHILTTLNISSKNLILKGKEVIVHYLGPEGELDWMPAFAEVGHLLNGLGNVQIVMVGPEVPTNLSGTTSGIGSRVRVNLVRGVYQVEASYLPSPHVVIALNSRLESYSSWGGALDVIKSIGVPAFFTDQSEVSCVNAKQVLRNAGLHITHPVTPNPFRSPVKNLTASSNLPSYSNGFVFGVNT

SEQ ID NO: 33484 - protein, 406 aa, Glycine max
  Clone ID: TF_700665732_FLI.pep
MDTDATGDPVDKLKAIQNDDVEYQDEDDDFDDEEEEEDDPITLGFVDKPKNEWSLRRQYFPSKTGGVPAWLDPLNIPSGRSSVCDICGDPLQLLLQVYAPTDKETTFHRMLFVFMCPSMKCLLRDQHEQWKRHPEKPSRSVKVFRCQLPRINPFYSPECPQYNESHEPAGSGAALCDWCGTWKGDKLCSSCRQARYCSEKHQAMSWRTGHKTACQQMKVSSPVFGPNKSGTTSLESHKVGSKNLWPEFEISIEDESEYNRDISEENSLANSLISRNRNDDTMNSLMDNFKGDDDKKSWASFQERIAEAPEQVLRYYRNTNAKPIWPVSSGRPSNADIPKCSYCSGPMSCEFQILPQLLYYFGVDNEVDSLDWASIVVYACEASCEASLPYKNEFAWVQIYSLSTTL

SEQ ID NO: 33485 - protein, 391 aa, Glycine max
  Clone ID: TF_GmC5714_1.pep
MRTRRGACYPGVVSRMCSNVRVTKKKSKDLHMHMHVPAGDSIIYSRKKQKKTPEKLAAGRYDFFESLPDDLVISIFCKLSSTATKPSDFVNVLITSKRLNRLALHSLVLSKASPRTFTIKAKYWCDSAHKFLKHCADAGNVEACYTLGMIRFYCLQNRGSGASFMAKAAINSHARALYALAVIQFNGSGGTKSDKDLRAGVALCARAAFLGHVDALRELGHCLQDGYGVRQNIAEGRRFLVQANARELAAVLSTGAAARTLLSWNLQPQQLRQGSGCPLLSDFGCNVPAPDVMAEWFVARGGSPGPGLRLCSHAGLCSNAGCGRPETRKHEFRRCSVCGEVNYCSRACQALDWKFRHKAECAPVERWLDEDGEDVGNDDGDGEVEVVMVDS

SEQ ID NO: 33486 - protein, 549 aa, Glycine max
  Clone ID: TF_GmC3960_1.pep
MLNKYRGLIIPKGSAILLQMSIHFGIYPRGLLNCGNSCYANAVLQCLTSTKPLVVYLLYRSHSKACCAKDWCLMCELEQHIMILRENGDPLSPSRILWHMRSINCHMGEGNQEDAHEFLRLLIASMQSICLEGLGGEKKVDPRIQETTFIQHTFGGRLQSKVKCLNCNHESERYENIMDLTLEILGWVESLEDALTQFTSPEDLDGENMYRCGRCTSYVRARKQLSIHEAPNILTIVLKRFQEGRYGKINKCITFPEMLDMIPFMTGTGDIPPLYMLYAVVVHLDTLNASFSGHYVSYVKDLQGNWFRIDDIEVQPVLVNQVMSEGAYILFYMRSCPRPPVEHTVKAVQQSVYDSSKHNPMEMQKPNKPGHSRHGSHQFFVSESSPNARPEISTHIIDTTNGFLRKSTNRNALPVTQTYAKNVRSEFSDTTSSDWSLFTSSDEASFTTESTRDSFSTVDYGDSCNMDPISSIFNYPPEKSYLKFSHSRPVTRVFPEKGHVKQVQRIDHSKRVSHSSSNEHPPNGNCGMYVYYGSNPVCGTTQTSSQCEF

SEQ ID NO: 33487 - protein, 153 aa, Glycine max
  Clone ID: TF_LIB4198-004-Q1-K1-B8.pep
MLEPRESDIPVLFLVLVVLPLVAYILLGKWSETSKKRDRINLLAHLAAEEALRAEEMAVADVIPPVSASKNEHHVCARCSAPARTRCSRCKIVRYCSGNCQIIHWRLIHKQECQQLEPHKSSSFPLAVSVEEFGHGDGSYFYENLNNQFLSPS

SEQ ID NO: 33488 - protein, 348 aa, Glycine max
  unsure (1)..(348): unsure at all Xaa locations
  Clone ID: TF_GmC3636_2.pep
MRRPWKHSKNKHDLFECLPDDLVVLILSKLSATASSPSDFINIILTCKRLNRSGLHRLVLSKAGPKVFAIKPKNWSEYAHSFLKHCVNAGNVDACYTLGMIRFYCLKNRGSGLSLMASLRNRSGFPVLYASAVIQXNGSGGSKRDKDLRAGVALSARASLLGHIDALRELGHCLQDGYGVRQNVTEGRRLLVQANVRELAYVLRAVAPPSRCCDESSSLLTWGALRCQRKNNNAVSSLACPLLSDYGYSVAPPEVQPANWFLREWFESGKGKLEEGLRLCAHIGCGRPETRPHEFRRCSVCGKVNYCSRGCQALDWKLRHKIECSPVEMYGDGGVDVENEFVVPNDAV

SEQ ID NO: 33489 - protein, 217 aa, Glycine max
  Clone ID: TF_LIB4167-022-R1-K1-H1.pep
VDPRVRVVCVVVAVIGFVIRHKWQVSEARKEEIKRLFILAAEETARAEKEASYEYGTAVSAAPTNLCAVCYFPATARCAQCKSVRYCSFECQTVHWRQGHKLECRPPSTTHQSDGATSDLGSKVVEQGYSGIHVGKSESEGKECKIASERPPIFDICFSPKVSSGKDANIRVESLAEGNITDSNSELSSNSFSGFSACTGSSDSSGGSSVCGSVMWN

SEQ ID NO: 33490 - protein, 347 aa, Glycine max
  Clone ID: TF_GmC586_1.pep
MSCRKRQKTSPDKTSDDFFDSLPDDLVLSILCKLSSTATSPSDFISVLITCKRLNSLGLHSLVLSKASHKTFSVKAKNWCDSLHRFLKHCADAGNIEACYTLGMIRFYCLQNRGSGASLMAKAAMNSHAPALYSLAVIQFNGSGGTKNDKDLRAGVALCARAAFLGHIDALRELGHCLQDGYGVKLNVTEGRRFLVQANARELAAVLSAGNTKRPWLTWSHHPVTHPRLRSGCPLMSDYGCNVPAPDAHPASQFMSEWFDIRGGFPGPDMRLCSHSGCGRPETRRHEFRRCSVCGVVNYCSRACQALDWKFRHKAECAPVERWLDDDDEDVAGENDGGDDGVMMVDS

SEQ ID NO: 33491 - protein, 126 aa, Glycine max
  Clone ID: TF_GmC24110_3.pep
MLVLGVWDLKWLLQFVFSAFVLAIGLHALLKNTASKYFEIEATFHAMPGPLTDHSLCAVCRNPANKKCSRCISVRYCSQACQQAHWKSEHKMRCKEFQGSASVMNLDQTEVTNRVFKASAAVNTSS

SEQ ID NO: 33492 - protein, 734 aa, Glycine max
  unsure (1)..(734): unsure at all Xaa locations
  Clone ID: TF_GmC5789_1.pep
MLVAVGASWDLNWFLQLLLSVIVVAVGVHYFVKATASKYFLVDANFEGDHHALAAADPMPGALAAAVDPLCAVCATPAPKKCSRCKAVRYCSQACQQSHWMSGHKTVCMNFHGTNARSSAQNGVINRGFKTSAAGGKGSSSIALIPDCGDGAISRPIKQAKDVLFPYDGXMRFLVVLLNHLMCPFLKQTVIWGMXDMGRSLEETSGCKEEQDDTDMVSSGLCSGPPNDNSFDKHPSVSRDHQNMEEDSEHIDVVNCIGGTXGYGKQEDAHEFMRFSIDTMQSVCLDEFGGEKAVPPNLQETTLIQESGNISRHLDAICTKCDKISNQYENMMDLTVEIHGDAASLEECLDQFTAKERLDGENMYKCEGCKDYVKAWKRLTVKCAPNILTIALKRFQSGRFGKLNKRVAFPETLNLSPYMSEAGDGSDIYKLYGVVVHIDMLNASFFGHYICYIKDFQGNWYRIDDWKVMTVEVEEVLSQGAYMLLYSRCSARTSSFQIQTSESSGIAEVQTEVEVEMEVEPGQTEQDECLSNMKALTCSRGSEVLPSDASPELKVSSSYDCESFAGLNSPVKREQFNDVDMMDVDSTGIVNEISCGAVESSYVPISQTDSDLGDVDMGRSLEETSGCKEEQDDTDMVRSGFCSGPPNGSSFFDKHPSVSRDHQNMEEHSEHIDVVNCKLITAKDNACYGNGYVSANDSSMPVEDAGSQFSGISSFPTENDKGNGIKKVEISADI

SEQ ID NO: 33493 - protein, 406 aa, Glycine max; identical to SEQ ID NO: 33484
  Clone ID: TF_GmC880_1.pep

SEQ ID NO: 33494 - protein, 107 aa, Glycine max
  Clone ID: TF_GmC5714_2.pep
GCNVRAPEVHPASLFMAEWFAARGGSPGPGLRLCSHAGCGRPETRKHEFRRCSVCGVVNYCSRACQALDWKFRHKAECSPVQRWLEEDGEDVGNDDGDGEVEVMVDS

SEQ ID NO: 33495 - protein, 220 aa, Glycine max
  unsure (1)..(220): unsure at all Xaa locations
  Clone ID: TF_GmC24110_1.pep
MLLSGGVSDLKWILQFVFYAFVLAIGLHALLKNTASKYFDLDATFHAHAIPGLLMDHSLCAVCRNPANKKCSRCKSVRYCSQACQQMHWKSEHKVRCKEFQGSSTSVMMNLAQTEVTNRVFKASSAAVNRSTCTSSIALIPECGRGTSRTIKQPKSVLFPYDEFVKLFNWDKPGFPPCXLLNCGNSCFANVVLQCLSFTRPLIAFLLEKGHHRECCHNDW

SEQ ID NO: 33496 - protein, 125 aa, Glycine max
  Clone ID: TF_uC-gmflLIB3275P157c04b1.pep
MLLSGGVSDLKWILQFVFYAFVLAIGLHALLKNTASKYFDLDATFHAHAIPGLLMDHSLCAVCRNPANKKCSRCKSVRYCSQACQQMHWKSEHKVRCKEFQGSSTSVMMKLAQTEVTNRVFKASS

SEQ ID NO: 33497 - protein, 187 aa, Glycine max
  Clone ID: TF_GmC154380_1.pep
RKLSLSTLPEKGRSLLATGVLCPRLSRRFSPSSPPGPRRSRLPAWVGVPGEVIISQEPYVCVPNNSSVSPQKRCDGCFTTINNNVLSRCSRCQLAFYCGTACQRSEWKLHRLECEVLSSLHKYKRKSLTPSIRLMLRLYLRRKLQNDKIIPSTAMDNYNLVEALVAHMSDITEEQLVLYAQMANLVN

SEQ ID NO: 33498 - protein, 161 aa, Glycine max
  Clone ID: TF_LIB3242-450-P1-J1-B9.pep
DLQSGLQNRKLSLSTLPEKGRSLLATRDFYPGEVIISQEPYVCVPNNSSVSPQKRCDGCFTTINNNVLSRCSRCQLAFYCGTACQRSEWKLHRLECEVLSSLHKYKRKSLTPSIRLMLRLYLRRKLQNDKIIPSTAMDNYNLVEALVAHMSDITEEQLVLY

SEQ ID NO: 33499 - protein, 123 aa, Glycine max
  Clone ID: TF_GmC142923_1.pep
MEPENGKFSFSEVIEQRSYKGDVYYVEGGENSAEVSDETALKCNDGCAVCGNPSSKVCSRCKAIKYCSQTCQHFDWRSGHKFQCLVEKANTTEKAIVNQGRPANGNVVNLTNSDEVEDNAHSS

SEQ ID NO: 33500 - protein, 84 aa, Glycine max
  Clone ID: TF_GmC95076_1.pep
KLQAQKALSENTRACHTCQKESDTLLKCTRCGISWYCNKACQEIGWKDKGHKDECRLLKNETLKQILLFDWKHFKDFVQFPLSA

SEQ ID NO: 33501 - protein, 155 aa, Glycine max
  Clone ID: TF_GmC5789_3.pep
MLVAVGASWDLNWFLQLLLSVIVVAIGVHYFVKVTASKYFLVDANFEGDHHHALATDAMPGALAAADPLCAVCATPAPKKCSRCKAARYCSQACQQSHWMSGHKTVCKDFRETSARSSAHNGVINRGFKATAAAGKSLLTMALIPGCGAGAISRP

SEQ ID NO: 33502 - protein, 165 aa, Glycine max
  Clone ID: TF_GmC441330_1.pep
MRVTIDLGFWSLVVVAVVGLIVPVIAFVVQRQCQRAAARAEEIKRLLVLAEEESVRAESESEASVYQQNSIVSAPPKNKVCAVCYSPTTTRCARCKAVHYCSGKCQIVHWRQGHKDKCHPPSPTCQTEDLVSDLGKKVAEPDYRGIHDEKSQTKSTEYATSSEKP

SEQ ID NO: 33503 - protein, 94 aa, Glycine max
  Clone ID: TF_LIB3049-052-Q1-E1-H7.pep
MECAAKGSGGRCGGSGSGGATRLCARCEAVAYCSLSHQIAHWSRHKHECDRLQQQVKSVEVLNNFPFTFSRESTFQVCVKQETRCSFFSKRGLH

SEQ ID NO: 33504 - protein, 1043 aa, Glycine max
  Clone ID: TF_GmC5843_1.pep
MSSKERSQQPHSRVPRRQEWIRRDVGGCSNPRKPKKGSSSNSREESNLPQLLQEIQDKLVKGAVECMICYDMVRRSAPIWSCSGCFSIFHLTCIKKWARAPISVDLSVEKNQGGFNWRCPGCQSVQLTSSKDIRYLCFCGKRPDPPSDLYLMPHSCGEPCGKPLERDLQGDKELLCPHLCVLQCHPGPCPPCKAFAPPRLCPCGKKNITTRCSDRQSVLTCGQRCQKLLQCGRHRCQQICHLGPCHPCQVPINASCFCAQKMEVILCGEMAVKGEIRADGGVFSCGSTCQKKLNCGNHICIETCHPGSCGDCELLPSRIKTCCCGKTRLEEKRHSCLDPIPTCSQVCGKYLPCGIHHCEEPCHAGDCSPCLVLVSQKCRCGSTSRTVECCKTKMENEKFTCERPCGQKKNCGRHRCSERCCPLSNPNNILNADWDPHFCQLPCGKKLRCGQHACESLCHSGHCPPCLETIFTDLTCACGKTSIPPPLPCGTPPPSCQLPCSVPQPCWHPASHSCHFGDCPPCSMPIAKECIGGHVVLRNIPCGSKDIKCNKLCGKTRQCGLHACGRTCHLPPCDNLSAVPGIRASCGQTCGAPRRDCRHTCTAPCHPSTPCPDTRCKFPVTITCSCGRITENVPCDAGGSCANYDADTVHEASIIQKLPVLLQPVAANGKKVPLGQRKLMCNDDCAKLERKRVLADAFEITAPNLDSLHFGENSVASELLADMLRRDSKWVLSVEERCKFLVLGKSRGNAHGPKVHVFCPMLKDKRDAVRVIAERWKLAVNAAGREPKHFVVVHVTPKSRAPARVLGFKGTTTVNVPLPPAFDPLVDMDPRLVVSFIDLPMDADISALVLRFGGECELVWLNDKNALAVFNDPARAATAMRRLDHGTVYQGAVVVVVPNVGASVASSATNAWGGSGTMKGGALAALKSNPWKKDVIQEPGWREDAWGDEEWATGSANVKLPIQKKEARISASVNPWSVLNQESSSSSSVAAIKIDGSRKHSESSVITKLEPRDGGSNLGGQPAGNFDALEASDVVDDWEKACE

SEQ ID NO: 33505 - protein, 682 aa, Glycine max
  unsure (1)..(682): unsure at all Xaa locations
  Clone ID: TF_GmC701_1.pep
HASVHLFCIQSWARQASDLAAARAATRLPISPATASASALWNCPKCRSEYPKSHIPKTYFCFCGKIENPPNDPWILPHSCGEVCGRPLKHSCGHHCLLLCHPGPCPSCPKLVKVRCFCGCLEDVRRCGFKEFSCNKPCSKFLDCGVHRCIELCHPGACPPCRTRGVHACQCAKVKEERECCDRVFQCGNPCEKRLGCGKHVCERGCHSGKCGECPLKGKRTCPCGKRVYEGMPCDAPVQLCGATCDKMLPCGYHRCPERCHRGQCVETCRVVVKKSCRCGSLKKDVPCYQDLACERKYAAGSFDVRTINALLHAIXRALCSLPNNGDNFMCMWRDTCHGAKPPPNPEFTLKPKKKKIIQQSESVPGTPCPPCPELVWRSCVGKHIGAERMMVCSDKSQFSCENLCGNPLPCGNHYCTKTCHALENQLQGSQPCEDCYLSCQKRXPACPHHCPRRCHPGDCPPCKVLIKRSCHCGAMVHVFECLYYNGLSAKGQETVRSCGGPCHRKLPNCTHLCPETCHSGQCTNAEKCCKKVTVRCKCHTLKKEWVCQDVQAAYHLAGCHPRDIPKNQFGIGLIPCNSDCNSKVQVVESELQLRKTRVTEVQEPDVEKSVRKRRKRREQVLESKETSKLQKIISRMKRLLLFVFILVILLAATYYGYKGLLWLNDWMNEVDERRQRYSRIK

SEQ ID NO: 33506 - protein, 212 aa, Glycine max
  Clone ID: TF_GmC701_2.pep
MSLWQPQERYLACERKCQRMRDCGRHACKRRCCDGDCPPCSEICGRKLRCKNHKCPSPCHRGPCAPCPIMVTISCACGETRFEVPCGTEMDNKPPRCPKPCPITPLCRHASNIKPHKCHYGACHPCRLPCAKEYQCGHTCKLRCHGAKPPPNPEFTLKPKKKKIIQQSESIPGTPCPPCPELVWRSCVGKHIGAERMMVCSDNHSSPVKFMW

SEQ ID NO: 33507 - protein, 86 aa, Glycine max
  Clone ID: TF_LIB3242-265-Q1-J1-F11.pep
MESDEPADPKQPVTPRACLQCRKVKMKCLKATQGTKCARCSRKSLQCDFLEHRRGRKKGFKLNRTASKAGLSTQIYPSSGLQMLAM

SEQ ID NO: 33508 - protein, 156 aa, Glycine max
  Clone ID: TF_jC-gmst024100g08a1.pep
HMRDNILIQLCSCHRCHSQKTKCSGKRPCDGCLSSGRAEECQFPAKERKIRVDERSAERRTSVIKVDKPPVISINSKKRTGVCEPSLPGARHWETSESPQIAKIKTNLRRCPKRRVTCLILSLTDTRRTQSTNGLWSLDSLEKHNALLSATDSYHA

SEQ ID NO: 33509 - protein, 148 aa, Glycine max
  Clone ID: TF_jC-gmst024100c06a1.pep
MAKRKSTPRTRSGCRTCKVRRVKCDDQRPSCRRCLDTGRACDGYGIWGQPKSTRLLPSPVYPLRTLPGLAEEERRCLDRFRVLLTDKLTRPFGSHFWSSLVLQLSVSEPAVLHASIALTSAYDSFALAQIRENVAMVAPAPFVLGRTT

SEQ ID NO: 33510 - protein, 123 aa, Glycine max
  unsure (1)..(123): unsure at all Xaa locations
  Clone ID: TF_LIB3139-105-P1-N1-G5.pep
LVLIFQSMVGVPGKSKACINCRKRRSQCDMKRPSCGQCQRSGITCSGYQKEFIFLNSTTQEAXDGSLSLEKESYSAGTRTRNPTTAGSAASRAAATRTTXVVLHATLERSAYENNVIDEFGHH

SEQ ID NO: 33511 - protein, 96 aa, Glycine max
  Clone ID: TF_jC-gmst024100a04a1.pep
MSNSSFLDRPLLKVSRPVAACSRCRTAKIRCDGKLPACSACERAGKADTCSSSDEFPRGKERSYVGSLEAYCERLEKRAAELRERKKILTGGEEGV

SEQ ID NO: 33512 - protein, 178 aa, Glycine max
  Clone ID: TF_GmC991_1.pep
MVTRYARFCGTPPDSLNLRRYDALLVCVTNAKGANIRKFDVTVYIKVLRAVDLPGQPVSELMEVRGDSDTSMVSFSEFLVMFDDPDWGFGIMPTLVKLETGDRNRHGDVVCSVCRYPIIGSRFKEIKSHFSLCNQCYSEGKVPSSFKQEEYRFKEYGSEGEAMKDKCMCFNLQSRNEK

SEQ ID NO: 33513 - protein, 117 aa, Glycine max
  Clone ID: TF_LIB3030-004-Q1-B1-E8.pep
MKYNEISHFSHTEHKLRFEYSEFPFKCDGCKEVGIGSRYKCSICDFDLHMHCAMITSPTLHHPFYTKCNFQFMSKPPGDTPRYCNACEKDVSGFLYHCKACGFDLQPCCAKLPLLLD

SEQ ID NO: 33514 - protein, 473 aa, Glycine max
  unsure (1)..(473): unsure at all Xaa locations
  Clone ID: TF_GmC14821_1.pep
HSTQTTSLTSGAFIECPFAGTYINSWTPLPGNSQMPPFKRSHSHTDAMSGMFHKGVRCDGCGVYPITGPRFKSKVKENYDLCNICFNEMGNGTDYIRMDRPASARAPRYLHGHTKNFPTLPPHIFKKGAILKHAKPKLDSRFILDVNVIDGTMMAPSTAFTKIWRMRNNGTIVWHKGTQLVWIGGDKFSDSHSVDLEVPEDGVPLEKELDIAVDFTAPPLPGRYISYWRMTTPSGHKFGQRVWVLIQVDASLQDSFYDTSQGLNLNIPLDISGSKGPQIIDINVQPTEEDTVLQTRNPNAPIEPVNQMVDNEPRFELENEFPINEATFVGPAASAPAATPVASSSVSYPIIDLSETTPAVPSNQQSSTVDVPSSSMGTGGINSVEESLLKELEEMGFKQVDLNKEILRNNEYDLYQSLDFLCGVSEWXGTIHLLAELREMGSRDXMNKRLLEKNNGSLKRVVMDLINGEQYFS

SEQ ID NO: 33515 - protein, 156 aa, Glycine max
  Clone ID: TF_GmC90028_1.pep
RYFSLLFFFGSEFDIHVFTHFLPSLAISSRLLQVPFPKQTMLATDDAVESVVSVPGPADPSTGNNQIMIEDDTITSSVQYCCDGCSTVPIQRRRWHCTVCPDFDLCEACYEVPDADRLPPPHSRDHPMTAIPIEVDSVGDGNEFQFTADDVSDQNL

SEQ ID NO: 33516 - protein, 222 aa, Glycine max
  Clone ID: TF_GmC4344_2.pep
TFFDTRQAFLSLCQGNHYQYDTLRRAKHSSMMVLYHLHNPTAPAFVTTCNICYLDIETGQGWRCEVCPEYDVCNACYQKDGGIDHPHKLTNHPSMVDRDAQNTEAREVRVVQLRKMLDLLVHASQCRSAHCQYPNCRKVKGLFRHGMHCKTRASGGCVLCKKMWYLLQQHARACKESECHVPRCRDLKEHLRRLQQQSDSRRRAAVMEMMRQRAAEVANNAG

SEQ ID NO: 33517 - DNA, 463 bp, Zea mays
ccacgcgtccgcaacaatttgatcaggcaataacctgacgaccctggtttgttctgtgaatgcattttcgtcgtgcttcaacaacagggaccggactacatggtccgcaacgcaaggaggtccatgctggaggagctggaggggatgctggagatcgtggagcctcagccgccggggaagccgaggacgcttagccgcaggaggttcgatctcccagaaggcgtagccatcgaaaaggagacgcgggaggcgggcaagtgaagtgcatcggtgggtggtggcatgcttgggcagtttggtatatgcgcgatgcggactatagagtttgagtttgtgctgctaccgaaccgtggaccaccttaccccgttgagatgtttgatagctggactttttgtgctgttgtatttgtagaccagaacgttgttctttgtaataaattggcgtgtgctgctttttgctaat

SEQ ID NO: 33518 - DNA, 269 bp, Zea mays
  misc_feature (229)..(229): n is a, c, g, or t
  misc_feature (238)..(238): n is a, c, g, or t
gcaagtcaaagcagatgccgtaagcttggcaagtagactcgaagccctagaaaagaccaaacgaatgtttctgggtgaaaatttagaagaatgctccattgaagaactgcataatctggaggttaaactggcgaagagccttcacgtcatcagagggaagaagacacaactgctggagcagcagatatccaagctgaaggagaaggagaggaccctgctccagacacancaaagattngcgggataagcagcgcaactcccagtctccc

SEQ ID NO: 33519 - DNA, 384 bp, Arabidopsis thaliana
gctctctgagcaagctgagcgttatgaagaaatggtggaatcaatgaaaagtgttgcgaaattgaatgttgatctgacggtggaagagaggaacttactctccttgaaccaatcacgttcttgtaacccacagagagtaagttcctctcttcgattgaacaaaaggaagcagtgaaagggaatgatgttaatgtaaagaggatcaaagagtatatggagaaggttgagttagagctttctaacatatgcattgatattatgtctgtcttagatgagcatctcattccttcggcttccgagggtgaatctactgtcttcttcaacaagatgaaaggtgactattaccgctatcttgctgagttcaaatcagggaacgagaggaaa

SEQ ID NO: 33520 - DNA, 320 bp, Arabidopsis thaliana
cacacgcgtccgctcctccatatcttaacaatttcatagcaaaccctaaaattgagaaagagatagagagagaaagatgggtagaggaaagatcgagataaagaggatagagaacgcaaacaacagagtggtgacgttctcaaagaggaggaatggattggtgaagaaggctaaagagatcacagttctttgtgatgcaaaagttgccctcataatctttgcaagtaatggtaagatgattgattactgttgtccttccatggatcttggtgctatgttggaccaataccagaagttatctggcaagaaactatgggatg

SEQ ID NO: 33521 - DNA, 570 bp, Arabidopsis thaliana
aatcattaagtaagaattcaaaaaaaatgtggaattaatatatgattattaggcttacttattgccgagattagcatgaagatctatgacaagttgttcttcatcatgcgagagaaggcctcgttttaagtcaggccggagatagttagtccaccggaggcggcacgtctttccacagcgacggagaccggccagcttcggcaaagcacgccagcaacaatggccattggttagtatgaagtttataagcttcttatcttcctccaccgtccacggccctttcttcacccctagcttgtcacagcatggctgtctccccattaaatactatatagaaatgatatgtgtgattgtatattatgttatatggggatgtgaaatagagagcgaaatggaagagatatggaagaataaagttatcgaggatggaaaatctcaacagcttgcaagttatgtcaaaagcttaccaaagctcacccaccgtatatataaccttctcacaccttttccccacaattggtttcaggaaaaaataactttacatcttaatattttcgaaattgttttagt

SEQ ID NO: 33522 - DNA, 320 bp, Arabidopsis thaliana; identical to SEQ ID NO: 33520

SEQ ID NO: 33523 - DNA, 570 bp, Arabidopsis thaliana; identical to SEQ ID NO: 33521

SEQ ID NO: 33524 - DNA, 272 bp, Zea mays; identical to SEQ ID NO: 28

SEQ ID NO: 33525 - DNA, 1652 bp, Zea mays
ccacgcgtccgcccacgcgtccgcccacgcgtccgcccacgcgtccgcccacgcgtccgctcctctctttccccggcacctgtcacgggaggaggatggacaagagcggcggcgaggcggcggcggcggcagcagcagcagacgacgtcgagcggcgggggggcgactacgagcaagacgagcacgagcggagagggacggtgtggacggcgacggcgcacattgtgacggcggtgatcggctccggcgtgctggcgctggcctggagcgtggcgcagctgggctgggtcgcggggcccctcgcgctcgccggcttcgcgtgcgtcacctactacacctccacgctgctcgccggcgcctaccgcgcgccgcaccccgtcaccggccacaggaaccgcacctacatggacgccgtcagatcgtacctcagtcccagggaggtgttcatgtgcggggtcgcgcagtacgtgaacctgtggggcaccatggtcgggtacaccatcacggcgaccataagcatggccgcgatcaggcaggccgactgcctccgccgggacggcgccggcgccggcgcgcgctgcgacgcgccagggaccgtgctgatgctggcgttcagcgtggtccaggtggtgctgtcccagttcccgggcctggagcacatcacctggctgtccgtcgtcgcggcggccatgtcgttcgcctactccttcgccggcctcggcctctccgtagggcactgggtgtctcgtggcggcggcggcctcgggggcagggttgcaggtgccgccgcggcatcctccaccaggaagctctggaacgtgcttctcgccctggggaacattgccttcgcctacactttcgctgaagtattgatcgagatccaggatacactcaagtcaccaccaccggagaacaggacgatgaagaaggcagcaatgtacgggatcggagccaccaccatcttctacatctccgtcggctgcgctgggtacgccgcgttcggttcgaatgctccgggcaacatcttggcggcaggcgggctgggtcccttgtggctcgtcgacattgccaacatgtgcctcatcctccacctgatcggtgcataccaggtatacgctcagcctgtcttcgcttcggttgagaggtgggccgcctcacggtggccagaagccaagttcatgagcagcgcatacaccgtgtccgtcagcatccccctcttgcagagaggatcggtcaccgtcgcgccgcacaagctcgtcctgaggaccgccatagtcggcgcgacgactgcggtggcgctggcgatacccttcttcaacgccgtgctggggctcctcggcgcgttcagcttctggccgctcacggtctacttccccatcagcatgcacatcgcccagggcaagatcgccagggggaccaagtggtggtgccttctgcaggctctgagcatggtttgcttggtgatctcggtggccgtgggtgtaggctctgtcactgacattgtcgatagcctcaaggcctcttctagccctttcaaaattgtaggctaacaggttactgtagtcatgtacaatgctctgagccgatcgtgcgttgaggtttaaaagaactgtggtgcgcgaaaaaaaaaaaaaaaaaaaaaaaaaaaaaag

SEQ ID NO: 33526 - DNA, 384 bp, Arabidopsis thaliana; identical to SEQ ID NO: 33519

SEQ ID NO: 33527 - DNA, 430 bp, Zea mays
ccacgcgtccgcaacaatttgatcaggcaataacctgacgaccctggtttgttctgtgaatgcattttcgtcgtgcttcaacaacagggaccggactacatggtccgcaacgcaaggaggtccatgctggaggagctggaggggatgctggagatcgtggagcctcagccgccggggaagccgaggacgcttagccgcaggaggttcgatctcccagaaggcgtagccatcgaaaaggagacgcgggaggcgggcaagtgaagtgcatcggtgggtggtggcatgcttgggcagtttggtatatgcgcgatgcggactatagagtttgagtttgtgctgctaccgaaccgtggaccaccttaccccgttgagatgtttgatagctggactttttgtgctgttgtatttgtagaccagaacgttgttcttt

SEQ ID NO: 33528 - DNA, 840 bp, Arabidopsis thaliana
tgacggaagagtttgagatcgcaggaatctccaccggagcttggtggagctcgccaacaaacaccgccgcagtattctctggctactcgctgccatgttccactgagattagccctgatgtcacaaatttcggatggcaaaacttcgataacaagattaacgatcataatgatggttgtatgaacatgcataatagtttcttcgaaggactattaatcgatcctaacgatcaattactaccggatccatggtccaaaagtacaattcctaacgctaaatctgagctccttgaaaacttcccattcttagataacatgttcttggtcgattcagaagctgaatctttgttggatcatgaaatcagaaaccataagtcgtctaaggagcaaattacacaagactacaagaatcttacttcaaaggcacgattagaagagaacagcgatgagtattcaccgcgattactaaaaagaccgagactcgagacactatctccattgccaagcttcaaagttcgtaaagaaaaactcggagatagaatcactgcgcttcagcaactggtttctccatttggcaaggcagatacagcttctgttctcaacgaagctgtagagtacataaagtttcttcaagaacaagtcactgtattgagtaatccagaacagaacaccataggatctgttcaacaacagcagggttcaaacaagaaatctatcaatactcaaggagaagtagaagaagacgaatgtagtccaagaagatatgtagatctttcgagccgtggactatgtctaatgccgatctcagcttcatatcccgtggctgcagctgcggcttcgg
